United States Patent Application Publication US 2025/0235397 A1 - sequence listing, part 2

SEQ ID NO: 10 - DNA, 8974746 bp, Bacillus subtilis (residues 1,794,951-3,589,900 of 8,974,746)
  source 1..8974746: mol_type = genomic DNA
gttaaaatcgcgttttgcacctcgcgttttgcgagaacacgattgacgttcagcgtgcattcatcaatggttaaatccggatgatattttttctgcagaaaaaagacaagctcggcaatgtctgatacctcaacgccgcgctccttcatccgtgctcttgctttagcttccatctgactgaattgttcgttttctgacatcagcttcacccaatcttttttactagtttatacaaaatgcttgagaagtttacgactttttcttgcgccttcttcggattaaaatatgtattcataattccggctgtgtatgactacgatgtgatgagccctaattcaacaggcaggtgatcatggtgaaaggtacaataaaagaaaaatacggcattcacatcaggcagctttccatgtaccagcacacatatcaatgctttcagacgcctaattcatactttctgattgtccccgtttcccaattctcagaaacagagctggcggagctttattacatgagtcagtatttacaagaacaaagtgacccatacgtttcggtttttatctttacaaaagaaggtgaactgacatttgaacatgagggaaaaacgtacgctctgctgaaggcggcccccccttattcaaacagggcgttctccattggagcggagcttgcggaatttcaccgaaaaggccgaggatatccatatgaggtgaaggcggccggaagaatcggccagtggaaggatctgtggggaaaacgaattgatcagctggaagcattttggcagagaaaggttcagacccctccgcatgagccattcgataaaaaaatgatcgaatcatttccatattatttaggactgtcagaaaacgcgatacaatatttagtggacactgagctggatgacaagccccaagccgctgattcaggaacgatatgccatcagcggatggaaaggcatacatggtcaccggaatcattgatcaggattccggcggattgggtgtttgaccacgcttcccgtgatttggctgaatatatgaggcatacgtttttgcatcacagacaagattttaatcagcagggctttctctttttacaggaatacgagcaagtcacaccgctgtcttcattttcgaaacgccttttatacagccgtctgcttttcccgcttcattattttgaaatcgtagaaagctattacatgtcatcagaatcagaaaagcattattttgaagaacagcttgacttcattcttaatgactgtgggcgttatgaacaatttctcaatacagcgcaggaattcatgaatatgcgggcgcagaagctgtttgttccacgcgtcagctggctcggcaaaggcagctcaaggtgaggagaaaatctgacaaaaataattagaaaataaagaatcttgtcatatcaatgcgttaagcgtttacattcgcaaaattcagcctaatgatgtcttgtcaaaacaggagcgggcttatataatgtttgtaacttatatgtctgtgttgagttaacaattgtcttttccaagaggacaatcaaaagaaaggtggagtttttttgaaagcgattcgtgtagggcttttaggtttaggtaccgtcggaagcggtgtcgttaaaattattcaagaccatcaggataagcttatgcatcaggtcggctgtccggttacgataaaaaaagtgcttgtaaaagatttagagaaaaagagagaagtagatttgccgaaggaagtgctcacgacagaagtgtatgatgtcattgatgatccagatgttgatgtcgtcatcgaggtgatcggcggcgttgaacagacaaaacaatatttggtcgacgcgctgagatcgaaaaagcatgttgtcacagcaaacaaggacttaatggctgtgtacggctccgagctgcttgccgaagcgaaggaaaatggatgcgatatctactttgaagccagtgttgccggcgggattccgattctgcgcacgttagaggaaggcctctcatcagatcgaattacaaaaatgatgggaattgtgaacggcacaacaaactttatcttaaccaaaatgatcaaagagaaaagcccatacgaggaagtgctcaaggaagcgcaggatctcggttttgccgaagctgatccgacttctgacgtggaagggcttgacgccgcacggaaaatggcgatattggcgcgcctcggcttctcgatgaacgtggatctggaagacgtcaaagtaaaggggatctcccaaattacagacgaggacatcagcttcagcaaacgcctcggctatacaatgaagctgatcgggattgctcagcgtgacggcagcaaaatcgaggtcagcgtacagccgacactgcttcctgaccatcatccgctttctgctgttcataatgagtttaacgctgtttatgtatacggcgaggctgtcggtgagacgatgttctacgggccgggagccggaagcatgccgacagcgacatccgttgtttctgacctcgtcgctgtcatgaaaaatatgcgcctaggtgtaaccggcaacagctttgtcggaccgcaatatgagaaaaacatgaaatcgccgtctgacatttatgcacagcagtttttaagaattcatgtaaaagatgaggttggttcattctcgaaaattacatctgtgttctcagagcggggcgtgagctttgaaaaaatccttcagctgccaattaaaggccatgatgagttagctgaaatcgtaattgtcacacatcatacatcagaagctgatttcagtgatatcctgcaaaacctaaatgatttggaagtcgttcaagaagtcaaaagcacatatcgtgtagaagggaacggttggagctaatgtggaaaggacttatccatcaatataaagaatttttacctgtaacagatcaaacaccggcgctaactttacatgaaggaaacacacctcttattcacctgccgaagctgtctgagcagctcggaattgagcttcatgtcaaaacggaaggcgtcaatcctacgggatcatttaaagatcgcggaatggttatggctgtggcaaaggcaaaagaagaaggcaatgacacgattatgtgcgcgtcaacaggtaacacttccgctgctgcggcagcatatgcagcccgtgctaacatgaaatgcattgtcatcatcccgaacggaaaaattgcatttggaaaactcgctcaagctgtcatgtacggagccgagattatcgcaattgacggaaactttgacgatgcgcttaaaattgtccgttccatctgtgagaaatcaccgattgcccttgtcaactcagtcaacccttaccgcattgaaggccaaaaaactgctgccttcgaagtgtgcgaacagctgggggaagcgcctgatgttttagcgatcccggtcggaaatgctggaaacatcactgcgtactggaagggcttcaaggaatatcatgagaaaaacggcacaggccttccgaaaatgcgcggctttgaagctgagggtgcggcggcaatcgtgcgcaatgaagtgattgaaaatccggaaacaatagcgacagccattcgtatcggaaacccggcaagctgggacaaagctgtaaaggcagccgaggaatccaatgggaaaattgacgaagtcactgatgatgaaatccttcacgcatatcagctgatcgcccgtgtagaaggcgtgtttgcagaaccaggttcttgcgcgtctatcgcaggagtgctgaaacaggtgaaatccggagaaattccgaaaggcagcaaggtcgtagctgtgttaacaggaaacggactgaaagatccgaacacagcggtcgacatttcagaaatcaagcctgtcacattgccgactgatgaagacagcatccttgaatatgtaaaaggagcggcccgtgtatgaacgaagccgacatgctgttctctgtcactgttcccggaagcacagctaacctaggccccggctttgattcagtcggaatggcgctcagcagatatttgaagctgaccgtctttgaaagcgacaaatggtcttttgaggctgaaacagaaacagtcgccggaattccggcgggtacagataacctgatctaccaagtggctaaacggaccgcagatttgtacggaaaagaaatgcctcctgtccatgtgaaggtgtggagcgacatcccgcttgcacgcggccttggcagcagcgccgcagcgattgtagcggccattgaactggctgatgaattatgcggcttaaagctgtctgaagcggacaagctgcatttagcgagtctagaagaaggacacccggacaatgctggcgcttctctcgtcggcggacttgtgatcggcctgcatgaggatgacgagacccaaatgatccgcgtcccgaatgctgacattgacgtagtcgttgtcattcctttttatgaagtgctgacaagagacgcgagagacgtgcttccgaaggagtttccatatgccgatgccgtaaaagcaagtgctgtcagcaatatcctcattgctgcgatcatgtccaaggattggccgcttgtcgggaaaatcatgaagaaggatatgttccatcagccgtaccgggcgatgcttgtgcctgagctgtcaaaagtagagcacgtcgccgagatgaagggcgcatatggaacggctctcagcggagcaggcccaacgattctcgtcatgaccgaaaaaggaaagggagaagagctaaaagaacagctcgcgcttcatttccctcattgtgaagtagacgctttgaccgttccgaaagagggaagtataatagagcgaaatcctttatatcaagtaaaaagtgtatagatcatgccaagcgttcctcagcgtcagcggagggcgcttttttttgctggagataaaggagtttttatttagaaaaacgaaatacatgtaaaaaggaggagatgaatatgaaaaagctgataaccgcagacgacatcacagcgattgtctctgtgaccgatcctcaatacgccccagacggtacccgtgccgcatatgtaaaatcacaagtaaatcaagagaaagattcgtatacatcaaatatatggatctatgaaacgaaaacgggaggatctgttccttggacacatggagaaaagcgaagcaccgacccaagatggtctccggacgggcgcacgcttgcctttatttctgatcgagaaggcgatgcggcacagctttatatcatgagcactgaaggcggagaagcaagaaaactgactgatatcccatatggcgtgtcaaagccgctatggtccccggacggtgaatcgattctggtcactgtcagtttgggagagggggaaagcattgatgaccgagaaaaaacagagcaggacagctatgaacctgttgaagtgcaaggcctctcctacaaacgggacggcaaagggctgacgagaggtgcgtatgcccagcttgtgcttgtcagcgtaaagtcgggtgagatgaaagagctgacaagtcacaaagctgatcatggtgatcctgctttttctcctgacggcaaatggcttgttttctcagctaatttaactgaaacagatgatgccagcaagccgcatgatgtttacataatgtcactggagtctggagatcttaagcaggttacacctcatcgcggctcattcggatcaagctcattttcaccagacggaaggtatcttgctttgcttggaaatgaaaaggaatataagaatgctacgctctcaaaggcgtggctctatgatatcgaacaaggccgcctcacatgtcttactgagatgctggacgttcatttagcggatgcgctgattggagattcattgatcggtggtgctgaacagcgcccgatttggacaaaggacagccaagggttttatgtcatcggcacagatcaaggcagtacgggcatctattatatttcgattgaaggccttgtgtatccgattcgtctggaaaaagagtacatcaatagcttttctctttcacctgatgaacagcactttattgccagtgtgacaaagccggacagaccgagtgagctttacagtatcccgcttggacaggaagagaaacagctgactggcgcgaatgacaagtttgtcagggagcatacgatatcaatacctgaagagattcaatatgctacagaagacggcgtgatggtgaacggctggctgatgaggcctgcacaaatggaaggtgagacaacatatccacttattcttaacatacacggcggtccgcatatgatgtacggacatacatattttcatgagtttcaggtgctggcggcgaaaggatacgcggtcgtttatatcaatccgagaggaagccacggctacgggcaggaatttgtgaatgcggtcagaggagattatgggggaaaggattatgacgatgtgatgcaggctgtggatgaggctatcaaacgagatccgcatattgatcctaagcggctcggtgtcacgggcggaagctacggaggttttatgaccaactggatcgtcgggcagacgaaccgctttaaagctgccgttacccagcgctcgatatcaaattggatcagctttcacggcgtcagtgatatcggctatttctttacagactggcagcttgagcatgacatgtttgaggacacagaaaagctctgggaccggtctcctttaaaatacgcagcaaacgtggagacaccgcttttgatactgcatggcgagcgggatgaccgatgcccgatcgagcaggcggagcagctgtttatcgctctgaaaaaaatgggcaaggaaaccaagcttgtccgttttccgaatgcatcgcacaatttatcacgcaccggacacccaagacagcggatcaagcgcctgaattatatcagctcatggtttgatcaacatctctaataaaaaagccaggctgatcaaatatcagcctggctgctttattaaaagacttgttctacttcaacgacacccggcacttcttcaagaagagcgcgctcaattccggctttcaacgtaattgttgaacttgggcagctgccgcatgcgcctagaagacgaagcttaacgataccttcatctacgtctacaagctcacagtcaccgccgtcacgaagtaaaaacggacgaagtttgtccagtacttcctgcacctgttctttcatttcaacttcagtcatgacattcgctcctttcgtcgtcataaaaccattatattcagtgtaacaataaaaatctattgtttggtttgcaaagttgctttccctattatagcacattcagacttcaacacaaaaacggtttttttctataaaaacgcccttaggctctgtatacttaaaagaaaggacttacataggagaagggggcgtctacaagtgatgaaaccagtcatgctaagcgtgtacggggcagaaaacgtttgtgcgagctgtgtaaatatgccgacagccaaggatacatacgagtggcttgaggctgcgctgaaaagaaaatatccaaatcagccttttgagatgcagtacatcgatattcatgagccgcctgacaatgaacatgcgaaagagcttgcggaaaaaatcagaaatgacgagtatttttatccgcttgtgcttgtagaagacaaaattgtcggtgaaggcaatccaaaattaaaagacgtttatgaggaaatggagaagcatgggtatacagaaaaccgctgacttgatcagcggttcttctctatcattaaccgttatggtgtttatacatccacagcaagccggatttcagcatacgcggaacacggccgatcagcggacggtcagcaacaagcccgaagccggctttttttccgagtgaaccgaggacgcctttcagcttaaactgcggcattgattcaggcagggcttctccattccagcgtttttgcaagatttggacaatctgctctgcttgagcctctgccagctgggcgctcggtgcatgaggaagactggcgcaatcgccgacaacgtacagatgttcatcacctggaagattatgatgaggcgttaatacaatacgcccttgtgcgtccttctccacatctaagtctctgacgactttgtttggctggatgccggctgtccacacgatggcgtctgcagaaatcggatcatcgtggttatacacaacgccttcttctacttttgtgatatttgccctgttaataatgcggacaccgtgctcttcgaaccatttttgcacatatttgcttaaacgctcgggaaagcttgataaaatgagattaccgcggtcgaacaaaataatgttcaggtcatcacggctttctctcaattcacttgcaagctcaacgccgcttaagcccgctccgacaatggcgacggtggcattagcgctcagattattcagcttttggtaggtttcgcgggactgatcgatggtttgaatactgtaggtgaattcaggcgctcccggcacgttgtgatatttatcctcacagccgagcccgattatggcgtcatcgtaagaaatcggttcacgatcttggaacagcacttgtttttgtacaatatcaattgatgtgatatcaccgtattggacatccaggcgagggtgctctgggaatgacactctgatatgatggtcagaaattgtgcctgcggcaagggcataatattctgttttcaagcagtgataaggatttctgtcaattaacgtgattgaaacatcatcaggcagctggtttggcaataagcgatgaagaacgcgcatgttcccgtaacctccgccgatcaagaccaattttttcatttgaattcccctttaatccgaagagtatgatagatacattgaagaaaatacgaactatgtaaaataacatctagaattatatcgaatttgatctaaaatcacaataatagtttcaaaataacctacaatttagcctgaaaacacaaattagtaaaacgttatttgagaaataatatgttacgataataaattttgaatcatccgttgtctttgacgaatagtgaaaaattcgcgataatggacatatgtgaggtgaaaccgcatgaatccaatgattgaattttgtgtcagcaatctggctcacggctctcaggaagcccgggcgattttggagaaggatcccaaccttgatgtccttgaatatggctgcttaagctactgcgggacatgtatggaatcgcttttcgctctggtaaacggagaagtcgtcatgggtgaaacgcctgctgagcttgttgagaatatatatacctttattgaagaaaatccaatgttttaaagaaaagggcctggacaggcccttttttattttgccgtacaaaagaactaaaaaaatgtgtagacatcaaaaaatattattgttatcgtataaaagatatttttttaaataaaatttaagaggtgtacgagtattcatgaatgttctgtgggggctgctgggcgcagttgcgatcattgctatcgcgtttttattttcagaaaagaaaagcaatattaagataagaaccgtcatcgttggtttatgcacacaggtggcgtttggatacatcgtgttgaaatgggaagcgggacgcgctgtttttttatggttttcaagccgtgtacagcttctgattgactatgcgaatgaaggcatcagttttatttttggaccgcttctaaaggtcggagacagtccggcatttgcattaagtgtactgcccgttatcattttcttctcagcactgattgcagttttatatcatttgaaaatcatgcagctcgttttccgtgtcattggcggcggattgtcgaagctccttggaacaagcaaaacggaatctctggcggctgctgccaatatttttgtaggacaatcagaatctccgttagtgatcaaacccctgattgccgggctgacgcgctctgagttgtttacgattatgacgagcggtctatcggcagttgcgggatctaccttgtttgggtacgcgcttctcggtattccgattgagtacttgctggcggccagctttatggctgctccagctggactagtctttggtaaattgattatacccgaaacggaaaaaacgcaaaccgtaaaaagcgatttcaaaatggatgaaggcgaaggcgcagccaatgtcattgacgcagctgcaaagggagcgtcaacaggactgcaaattgcgttaaatgttggggcgatgctgcttgcgtttgttgcgttaatcgctgtagtaaacggtattctcggcggggctttcggcttgttcggtttaaaaggcgtaacattagaatccattctcggctatgtgttttctcctatcgcctttttgattggcgtgccttggcatgaagcattgcaggcgggaagctatatcggccagaaattggtgctgaatgagtttgtcgcttattctaacttcggttcgcacatcggcgagttttctaagaaaactgctaccattatcagtttcgcgttatgcggattcgccaatttttcatcaattgcgattatgcttggtacgcttggcggtttagcgcccagccgccgttcagatatcgcacgtctcggcctgaaggctgttcttgcaggaacattagccaatctgctcagcgcagccattgccggcatgtttatataaacgataaaagctccttgcgtcagtgcaaggagcttttatgtatgaaaaacgggggataattgtattgtgtccgcttataatagcttttatactaagaaaaagaaaaaaagttggaggcacctatgaactcatttcgatttaccaaaatgcacggcctgggaaacagttatatttatgtgaatcaatttgaagaacagcttccagaagaaaaactgtcagagattgcaattcaggtttcttctgtttatacagggatcggatccgacggaatgatcctgatatgcccatcagaccaagcgcctgttaaaatgcggatttttaataatgacgggtctgaagggaaaaactgcggcaacggcctgcgctgcgtcgcaaaatacgcatatgagcataagctggttgaggaaacatcttttctgattgaaactctctccgggcttgtgaaagcggaggttcaagtcgaaaacggaaaagtgaatgtggtcactgtcgatatgggcgaaccgcgcttgacaaaatccgagcttcctatgcttgacggcggggaagagcacacaatcaatgaaacgatggcatttggtgaagtagaactaacaggcactgccgtttcaatgggaaatccgcatatcgtttttccgatcgcagacattgaacaggcacccttaacgacactggggccggtgattgagaaagatccgagatttccggaaggcatcaatgtggaattcgttgaaaccgtgaatgaacaagaattgcatttccgcgtctgggaacggggatcagggattactcaggcatgcgggacaggagcatgtgcagcggcagtcgcatctgtattaaacggcgtatcaaagcgaaatcaagacatcacggtgcatttagcaggcggggatttggtgataaactggaaagataacggccatgtaatgatgacagggccggctgaaaccgtttgtgagggtgtctatttcttgtaaaacaccttgtttgagaattggaacgatcatgtttataataaaagacagcaaccggtttttaaaaggaggttcataatgatgagcaacccggtaacaattacagaagcagcagctttgcatataaaagatatgatgaaagagcatgaagaagaaaacgcgtttctgcgtgtaggcgtcaaaggcggcggctgcagcggactttcttacggcatgggctttgagcatgaaaagagtgaatcagacagtgtgtttgatcagcacggcatcactgttctagttgacaaagaaagccttgacatcatgaacggcaccgtgattgattataaacaatccatgctcggcggcggcttcaccatcgacaatccaaacgccatcgcttcatgcggctgcggttcttcgttcagaacagcaacgaatgcaggcaagcctgaagagtgctaagcactaaaaacggatagcaactattactgacgcttttcttagcgataaatcatcgttaagggaggcgtttttattatggggaaatgatgcagagagttccgggaacttcggcaagagaaacgctgctttgttgtttgatttttgttgtaaatacagcaaagttacgatatatttaatgcggagtatattttattgcatttacaacaaaatcacgatagggagttggtgatgaagaagatttttggaatggtaacaaggtcagtatgtgttccgtgtttaaatatataaaagggacacaagacaattgaattttaaataaaggggctgaatccgaacaatgagtgtaaaaatgaaaaaatgcagccgggaagatttacaaacacttcaacaattgagtattgaaacattcaatgacacttttaaagaacagaactcacctgaaaatatgaaagcctatttagaaagcgcatttaacactgagcagctggaaaaagagttatctaatatgtcttcgcaattcttttttatttactttgatcatgaaatcgctggatatgtaaaggtcaatatcgatgatgctcagtctgaagaaatgggtgctgaatcacttgaaatcgagagaatttatataaagaacagctttcaaaaacatgggcttggcaaacatctgctgaataaagcgatagaaattgcgctggaacgtaataaaaagaacatttggctaggtgtgtgggaaaaaaatgaaaatgccattgccttttataagaaaatggggtttgttcagaccggcgcccactcattttatatgggtgatgaagaacaaacggatttaatcatggctaaaacactcatataatatttttcgaagggtggatgatgatgtatattccaaaatattttaaagtcacaaatgctgaagaaatttggaattttgtacaagaaaactcctttggtacggttgtcacaacagaacaaggaaaaccaattgccacacatttgccgttaggattcaataaaaaagacgatcattactatattacggggcatttcgcttatggaaatcctcagtggagaacgtttgaagcctgtgaagatgtgcttgtgatgtttcagggaccgcacgcttatatttcttcttcctggtattcgcgcgaaaatgttccgacgtggaattatcaggctgtccacatgtatggaaaagcaagtatgttagagaaagatgaattagcagaagaattaacaatcatgttggagaaatacgaaaaacatcgtgacaatcctgtgttatgggataagctttctccaaaactcttagaaagtgaattgaaaggtattgttggatttaagattaaggtggaagacattcaagcggcatataaattaagccagaaccgaaatgaaacggattatatgaacgtcattgaacagttgcaaaatgaagaaaatccaaatgcaaaacaaatggcagaactgatggaagataaactcaaaaagcaaatataagcttactttgctgaagaagtagcagaaaacgccaactcaagcggagaaccgctgacttggcgtttttttatgattaatatttatccccattaaaaatggaattcttcacaatcacataatccacattgcggatggcgttaagctttgttccgcctgcataagaaatagaagattgaagatcctgctccatttcaatcagtgtatccttgattgagcctttatgcgccacgtgcatttttttgccttcgacatttttcttttcgcctttttggaattcagaggctgagccgaagtactccttgtaaagctttccgtctttttcgatcgtttggcctggcgattcttcgtgtccggcaaatagtgaaccgatcatgaccatcgttgcgccgaatcggattgattttgcgatgtcgccatgggtgcggatgccgccatccgcgataatcggtttgctggcagccttggcacaccagcgcagcgctgctaattgccagccgcctgtgccgaagcctgttttgattttcgtaatacatacttttcccggtccgatgccgactttagtggcatccgctcccgcattttcaagctctctgaccgcttccggcgttccgacattgccagcaataacaaagctgtccggcaaatgttttttaaggtgctggatcatttcaatgacagcatttgagtgcccgtgagcaatgtcaattgtcacgtattcaggagtcagattttcttctgccagctggcggacaaattcatactcctcatctttgacgcccacgctgatagaagagaataacccgcgtgcgttcatatctttaataaaatcaattcgtgtctcaggctcaaatcggtgcatcacataaaagtagccattttcggctaatgaaatcgctagtttttcatctataatcgtctgcatattggcagggacgacgggcaatttaaatgtatgtccgcctaaacgtacggatgtatcacattctgaacggctattcacaatgcattttgcaggaattagctgaatatcttcgtaatcaaatacgttttccatggttttcactcctaaaaacgaatatttaaaagtataatatatgaaatgttcgccttatataatgtactctgttttatttaggatgtcaaacattatgatttgctggcaggtgtggtgcaagtgccgaagcttgtcatgcagggtgagtttaggtatcatagttttaacgaatggtcttagagagcggatcaaaacgcgaatgatatacgttcagcaaagcttggtcgttcagcaccaggctttctttatggcatggacatgggaaaggagcgaataagatggcccaaaacgaagaaaaaacaccgaagtcccaaaagattcaggaccgcattattatggcaatgatctgggtagtcgcagcccttgtgattgcgctggttgtaggaactgcattgaattatataaatatcttcaaataaaaaaggagctgtgtcgcagacacaagctcctttttttattatttattttcaaaaagacttgttgagtgaagaggctgtacgcgggctttcgggtccatgtaagccttggcgttgttcactgctgtcggtgcctcgccgaagccgctggcaatcaggttgacttttccttcgtatgtacaaatgtcacctgctgcaaagaagccttcgatatttgtttccattgttgatttcacgacaatggaatttttctcgatgtccaggccccagtttttgatcggtccaagagatgaaacgaaaccgtagttgacgattaagtcatcaatttctaaaatctctttgcggtcgcctttcacttcttcaagcactagctgttcgattttgtcttcgccgatcagctccgcagggacgaatggtgtcaggacattaaccttcgacgcatgaaggttttccacactgtgctcgtgcgctcggaacttgtcgcggcggtgaatgatcgatacttcttttgcgattggctcaagcataagcgcccagtcaaccgcggaatctccaccgccaaggatcgcaacgcgtctgccggcgaatttttgcagatcatcaacgaagtaatggaggtttttgccttcatactgctcggcattttcaagttccagctttctcggtttgaatgcgccgtttcctgcagttatgatgaccgttttagagtagtgggtttcttcatttgttacaagcttaaacacgccgtccgcttgtttctcaacagattcaaccgcttgctccagacaaatggtttggtcgaatttcgccatttgctcttttaggttattgataagctcttgcgcgcggattttcgggaatcccgctacatcatatatatacttctcagggtatagggcgctaagctgtccgccgagctgaggcaggctttcgataattttgacgcttgcctgtctcatcccgccgtaaaaagcggtgaataagccgaccggtcccccgcctataattgtaatatcataaacctttgtatcctctcgcatacgaaaattgcctcctaaatgaaaattgttattaattataccatattgccgttcaaattgacgagtcagcagaaaaaatcgtaaggatctaacgtgcccatccgttcttgaaaatatttccgcaggccgctacgataataaccaaatgaaatgatctttttctgaatgtttcttgggccagccggataaacatgataatagtgctacgggtaaggacttcacaaaaaacttttcaatatatttcataaaatcccgccaataagctgaagctaacacaaatgatgattttattatgggtctaacaaaagcaaaaaaagagaaggtggatgtgatggcattgaataagcccaaaatcgtgattttaggtgcaggatatggcggattgatgacggtgacaaggctgacgaagtatgtcgggccgaatgatgctgacattacgcttgtaaataaacacaattatcattatgaaacgacatggatgcatgaagcgagcgcgggtacgctccatcatgaccgctgccgttatcagataaaagatgtaatcaaccagtcacgggtgaattttgtacaggataccgtaaaggcaatcaaaattgatgagaaaaaagttgtgcttgcgaatggagaattgcagtacgattatttagtcatcgggctcggcgccgtgcctgaaacgttcggcattaaaggcttaaaagaatatgcgtttccgattgccaacatcaacacgtcgcgcctgctgcgggaacatattgagctgcagtttgcgacttacaatacggaagcggaaaaacggccggacaggttaacgatcgttgttggcggtgccggatttacgggaattgaatttcttggcgaactggctgctcgcgtgccggagctctgtaaggaatatgacgttgacagaagccttgtccgcatcatttgtgtggaagcagcgccgaccgttttgccgggctttgatccggaacttgttgattacgccgtacattatcttgaggaaaacggagttgagttcaagatcggaacggctgtacaagaatgtacaccagaaggagtcagagtcggcaaaaaagatgaagaaccagagcagatcaaatcgcaaaccgttgtatgggcggcaggtgtccgcggccatccgattgtggaggaagccggttttgagaatatgcgcggccgagtcaaagtcaaccctgatctccgcgccccgggacatgacaatgtctttattctcggcgacagctcgctgtttatgaatgaagatacagagcgcccgtatccgccgactgcgcaaattgcaatgcagcagggcataacggtcgctaaaaaccttggcaggcttattaaaggcggagagcttgaggaattcaagccggacattaagggaacagtggcttctcttggcgagcataacgcggttggggttgtttatggcagaaagctgaaaggcacgcccgcttcgtttatgaaaaaagtcattgataaccgctcactgtttatgattggcggactcggactgacattgaaaaaaggcaagttcaagtttttctaaaaacccgcggaagcgggttttctttattaaaaaacgccaaaataaaaagagaacgagaggaaaacaagtatgtttccgcttacatcaaaagatttgtcacatgatctgactttattgttgacagcttgatatggtatattatcagaaaattaagaaaaagggtgatgattagatgaaaactgcaacgacaaccgcttcacatgcatgcccattttgttcagggaaaggatattttcaattgattctcggcggttcagagacttgtccgtcttgccaggggacaggaaaagacagtcattctttttccagccgttgactttatttcagcccccgcgttacactaaaaacaacgcaggggggtggaataggttgattagtctgccagtcgtaatcatctcaattgttttgttttttgtcttgttttttggaatcggtttcttattaaacatgctgctgagaatgtcttggattatggctgtgatttatccaattgtatgccttttcattatcagcaaagaaaagctgatcagctatgtccagtcgccgggagaatcctttgccagcctgtttcatcgtgtcttatcattagcggctgctgatgtgctgattttagtcagcggtttggccggcgccatcgtgtccggtatagcgatcaacatgcttagaaaaagaggatatcaaatgttttaaatgccgctttcttctaaagaaagctttttttatgcgttcagctcattcaccattttgaataatgctctctccacttgggaacaatgattcggaggagaggtgaatgatgttgaatatgatcagacgtttgctgatgacctgtttatttctgcttgcatttggcacgacatttttatcagtgtcaggaattgaagcgaaggacttgtcaaaatgggtgcaggaacatcaggaaaagcacttgaagcatgcaggactgagattaaaagcattgcagcagaaacaaacacaaaccacgtccgcggctgaggataaaacaaaaccgttagaagaggcatttgattgggatgaatatccagtccaaagagtaacagcaacaggctacacagcaggagctgagtcgacgggcaaaaatcccggtgatccattatacgggcttacatattcaggtgtgaaagtgaaacgggatttatattccacggttgctgctgacccgtccgttttcccgatcggaacaattttattcattccgaactacggtctcggagttgtggccgacacaggatcagctattaagggaaaccgccttgatctgtactttgagacagtcaaagatgtatacaatgaatggggcaaaaaaacccttgatgtatatgtgattaaaaagggaacgggaaagattaccgaggatgagcttgagaagctcaatgaaacaaaatctttgcaagtgttcagaaatcaatataaaacggtgaaagaataaaacgctccagcgaaagcaggagcgttttttttacatgaaaaagtaagcgagtaccaatgtcagtaaaatacctgttaatcctccgaaaaagacttcgatcggctgatgtccgagaagctctttcagctttttttgcttttctttctctgcagccttagggaagtccttcgcttcatttacgaaacggttaaaatcaataacaagcttattaatgactgttgcctgctcaccggcgtgacgtctgacgccagttgcgtcaaacatggttatgacggcgaaaatggcggaaaccgcaaagagtgaggagtctaatccatgctccaaggctacgcctgtagaaagcgcagtgaccgctgcggagtgagagctaggcatgccgcctgtgcttgtgaccagcgaccagtccagttttctggacacgataaactgtatgggcactttgatgacctgagcaaaaataattgcggccaggcttgataataaaggaaaattcgttaaaagttccatcggcgacatcctttctatttgaaaaatccttcgtgtttcaaaagaaaaaagcaagtcttagactgttgtttgttaaaataagtatagtggaaagaatgtttttcctattataccattgttcattacaaatacccattacgttaggagtgtaagcctcatgttttatgcggttcaacaatcagagcatacagaaacccttgttgtcgggctttttcaaaaaagccagctgacaggaaaagcgttggaaattgatgaaatgctcgaaggccatctgacacagcttttaaaagagggtgatgtctctgcgaaaccgaatcaagtatcaaaagtattccctccatcttctgcgggtatgaaacggatttatttcgttggcctggggagagaagcaaattattcgtttgaacaggcgaaggaacgttttgctcatgtttttcaagccattcataaagatcgaaaacaagaaactgctgttctgcttgatacgtttatttcggaagacgtgcctccagccgatgccgctcatgctttagctgagagctgcctgcttgcttcctatgaggtgcaggattataagcataaatcaaatgagcctgacaaacaaattgaagccgtgtatgttgtaacagatgaagatacacaggaagtgcaggcagggcttcgcgtcggccaggcatacggacaagggacaaattcggctagaacgcttgtgaatatgccgggaaacatgctgacagcgactgacctcgcttcgtatgctgaagagcttgcggcgaaatatgattttgagtgtgagatattggagaaatcagagatggaagagctcggtatgggcggaatacttgcggtaaaccaaggctccaccgaaccgccgaaaatgattgtgttgaaatatcagggcaaaaaggaatgggaagacgtcgtcggactagtcgggaaaggaattacctttgacacaggcggctactccattaaaacgaaatctggaattgttggcatgaaatcagatatgggaggagcagctgcggttctcggggctatggaaacgatcggagagcttcgtcctgaacaaaacgtgctgtgcgttattccatcaaccgataatatgatctccggcggggccatgaagccggatgacgtgatcgtatctttaagcggaaaaacaatagaaatccttaatacggatgctgaaggaaggctagtgcttgcagatggcattacatacgcgaaacagcatggcgcatcagttcttgtcgatgtagctacgcttaccggcggcgtcgttgtggcattaggaacagaaacaaccggtgcaatgacaaatgatcaaagcttttaccagcaggtagctgatgctgcacaagagtgcggcgaggcgatctggcagctgccgataacagagaaggataaaaaacgcgtgaaaagcagccaaatggcggatctcagcaattcaccgggacgcgagggacatgcgattatggcaggaacgtttcttggtgaattcgctgagtcaacaccttgggttcaccttgatattgcaggcacagcgactgccaataaagcaacctgcttcggaccggccggggctactggcgttatggcaagaacactggctacacttgcggagcgatttacattggaagaagataaaaacgagtaatgaaaaatccctgctgtatgatgcggcagggattttttcttccgaaatctttagttgactaaagtggatcggttatgatacgatacgttcgtactttatttatctactacattagcaaactaaaggatttttggaggggtatcatcatgaatgcagtcgtcatcgcagtcctgcttatgcttgtattaagcctgctgcgtgtcaatattgttatcgcattaattataggcgccttggccggcgggttaacaggcgggctcggtcttggcgaaacggttaaagctttcacagacggtctcggcggaaatgccaccgttgcagttagctatgccatgcttggcgcgtttgccgccgctttgacgaaaacgggtcttccggacgcaatggtggaagcctccgttaaattaatcggaaataaagaagattctcgaaaaaaagcactgtctaaggtgctgattgtgctgattattttaattgtatcttgtttttcgcaaaacgtcgttccggttcacatcgcgtttatcccggtgctgattccgccgcttttgaaaatctttaatgaacttgaaatggaccgccgtctgatcgcgtgtgtaattacatttggcttaacggctccttatattttgcttccggtcggtttcggccaaatcttccaaggcatgctgaaggacaatatggcggatgccgggttaaacgttccgcttgctgatattccgtacgcactgattattccagttgcaggtatggttgtcggccttattttatcagtgatcgtataccgtaaaccgaaacaatatgaaacaaaagacatttcaggtgcagaagcatcgccatatacgagaaaaagtattggtatcgcggttctagccattgttgtgtcactcggcgtccagctttacttatctcagactttgggagtagaaggaatgattatgggggcgctcgctggtctgattgttctgtttgtcagcggtgtgatgaagcgtgatgaagcggactcactgattactgatggaatggttttaatggcctttatcggctttgtcatgcttgttgcagccggattttcaaacgtattgacgaaaaccggagatgtcgagtcactggtcaaaacgtcagctggttttatcggacacagtcagtccttgggcgcattgctgatgctcattgtcggcttattaattacaatggggatcggatcttcttttgcgaccattcctgttatcacaaccattttcgtgcctctatgcatgcagcttggattcagcccgatggcaacgattgcgattatcggggctgctgctgcgcttggcgatgccggttcacctgccagtgacagtacgcttgggccgacttcaggtttgagtgcggacggccagcatcaccacatttgggatacttgtgtgccgacatttatattttataatattccgcttgtcatctttggctggattgcagcgcttgttttataggaaaaaggctcccctttactggggagccttttctcgttatgataaaaaaaccgtccaatagaacggtttttacgtagatgatatgtgatttctgttaaagccggttgctttatgaatagagcggtagattgctggtgcgataaacgacagtatcacagccagcgctgtatcttttaccataaaccaaatcataaagccccaagccgtgccgtagctcactggcgtatgaatccacagcttcagtgcaagatacatataggtagtgccgatgagatacatgatcgccgttccgataagtgaagcaatgagaaatcgaattttacttggctgaatgtttcgttctaaaaaccatcccgctgcaaatgctgccggaatgtatgagataataaacccgccgcttttccctgcaaacggtgcgaagcctgctgaaaattgagcaaacacaggcgctccggccaatcccacaagtgcatatacaatcatggcaatcgctgcccgtttgctgccaagaagcaaagctgccaagagacagaaaaacggctgcatcgaaagcggaatgccggctacttgtaaaaagggtgctactgatgtaatgttggccccgacagccataagtgcggcgaacatgccaatcagcgccatatctcccgcacgaagtttacgttgtttcatcgttgttcccccttaggttgacatacacaatcatagagtaataaagaacaaaaagattgtcaacatgattttaaattaggttaacaaaaaggaggcccatatgtatttcggaaaaacaagacagtccgatcaatctggaagagtgccgccaaatcaaaacgtcaccacttcatttcctgtgcttcataccggagatgtcccatattacgaagatatgacgaaatggaatcttcaagtatacggtttggttgaccatccgatgctgctaagctttgaagatgtcaaagcctttccacggtatgaatcgaaaaacgacattcattgcgtcacgggatggtcaaggcttgataatgtgtggcaaggcgtgcgggcttgtgatatagcggaaaaagcgggtgtaaaagaagaagcgggctacgtcattttacatgctgaagagggctggacgaccaatctgccgcttgatgatttcttagcggaaacttcccttctggcttatgcgcataatggcgaacctttaacccctgaacacggctttccgctgcggggtgtatttccgcatctgtatttttggaaaagcgccaagtggctgcgcggcatccaatttacgaaagaaaatcaccctggcttttgggagcggaatggctatcacatgagaggcgacccttggcaaaatcaaaggtttacatgggattaaggttctatttcaaataggacaatacgcatctttattaggtttttacttccatattgatagtctgcaggtaccttatttgatcaaggtgccttttttattcgggaaaaagttgactttctttggaagaaaacctattatttgaggtgtctagttgatagtgaaaatcattatcatacattgcggtttagtttaaggagaggaatgtcgtactgcatgaaagaacaaacaacagaccggacaaatggcgggacatcaaacgcatttacgattcctggtacggaagtgcgtatgatgtcttcacgcaatgaaaaccgtacctatcacatttttatctcgaaacctagtacgccgccgccacccgctggttatcctgtgatttatctgctggatgccaattctgtcttcggaacgatgacggaagccgttcgaatacagggacgccgacccgaaaaaaccggggtgatccctgcagtgatcgtcggcattggctatgagacagcggagccgttctcctcagcacgccaccgggattttacaatgccaacagcccaatcgaagctgccggaaaggcccgacggcagagaatggccggagcatggcggagcggagggctttttcagatttattgaagaggatttaaaaccggagatagaacgagattaccagattgataaaaaaagacaaacaatctttggccattcgctcggagggcttttcgtgctgcaggtgctgctaacaaagcccgatgcgtttcaaacgtatatcgcgggaagtccgtccattcattggaataaaccgtttattctcaagaaaacggaccatttcgtctctctcaccaagaaaaacaatcagcctatcaatatcctgcttgccgcaggagaattagagcagcatcataaaagccggatgaatgataatgcaagggagctttatgagcggctggccgttttatctgaacaaggtatacgggcagaattttgcgagttttcaggagaaggacatatttcagttcttcctgttttggtcagcagggcgctgcgttttgcgcttcaccctgacggaccgcatctatcaatgggctgagacatactcagccttgcctttaaaaaaatatttgtcactgaaattatatttgactgtcacatgacatttggatatgattatttttataattgataatgataatcattatcaatagattgcgtttttcaaggcgcagcagtctttttcgctggatgtctgtttggcatttagagcgaagaaaggaattgatgatatgaatgcaaagggtatagagggaaaaattgcttttataacaggggctgcccaaggaataggcgaagctgttgcgcggacgcttgccagtcaaggcgcacatattgcggcagttgattataatcctgaaaagctggaaaaggttgtgagcagcctcaaagcagaaggccgccatgcagaagcttttcctgcggatgtgagagacagcgcggcgattgacgagatcacggcgcgcatcgaacgtgaaatggggccgattgatattttagtgaatgtagcgggtgtccttcgcccgggactgatccattcgcttagcgatgaggaatgggaggcgacgttctcagtgaattcgactggcgtatttaacgcctcgcgttcagtcagcaaatatatgatggaccgaagatcgggttcgattgtaacagtcggatcgaatgctgccggtgtaccaagaacatctatggcggcatatgcgtcttcaaaggctgcggctgtgatgtttacgaaatgccttggccttgagcttgcagaatacaatattcgctgcaacattgtatctcccggatcaacggaaacagacatgcagtggtcattatgggccgacgagaatggagcggagcaagtcataaaaggatcacttgagacatttaaaacagggatcccgctcaaaaaactagccaagccttcggatattgcggatgcggtgctctttttggtttctggccaggcagggcatattacgatgcataatttatgcgtagatggcggcgcgaccttaggcgtgtaactgaatttaaaggaggttcatgagaatgttggatcaaaacgttataacagaaacaaaagcggagcatttgcttcatgaatatcagccgggcgcctttttcttagcgtctcctcatcgtgtactgttagcgaaaggcatatgtgaaattgtaccggaggcagacgggcaaaaccaaatggaaaccctttctggccgaattgcagaggcgttacgtcaggcaaaacaatcagggcaaagccggccgcttgttgtcggggccgttccttttgatcaagtaaaagcagcgcggctcgttgtacctgaagaagtgcgctggtcaggaccgcttcaatttgatcatgaggaaaaggaacagcaggctgggcatacataccacataaagcctgttcctgaacctgaggattataaaaatggtgttgaacaagggctggcacgcattgccgatggaacactcagcaaaatcgtcctgtccagatcgctgcatttgacatcgcctgaaccgattcagacggatgaattgcttcgccatctggctcagcataactcgcatggctacacgtttgccgcagacgtgtccagtcaggaggaaacgtctccccgcagaacattgctcggagcaagtccggagcttctcgtttcaaggatgggaacacaggtcgtttccaacccattagccggctcaagaccgcgcagtaatgatcctgttgaagaccagcgccgggcagctgaattgctttcttccgcaaaggatcttcatgagcacgcggttgtcgctgacgcggttgcggcagcgctgagacctttctgccggacgctggaggttccggagaagccttcactgatcaaaacggaaacgatgtggcacctgtccagcgtgattaagggagagctttccgacccgtctgtaaccgcacttgaattggcggcggcgctccacccgacgccagccgtctgcggaacaccgactgatcttgcaagagaagcgattctcagcattgaaccatttgaccgcggtttctttaccggcatggtcggatggtgtgacgatgccggtgacggagaatggatcgtgaccatccgttgtgcagaagcagaagaacgctcactccgcctgtatgctggagctggtgttgtggccggttcaaagcctgaggacgagcttcaggagacgtccgcaaagtttcggacaatgctgcgggcaatgggcgtggatcacatatgaacagaatgaattgctggagggatacaacatgctgaaaggatttacgccttggcctgatgagttagctgagacctatcgaaagaacggctgctgggccggtgagacgtttggagatttgttaagggaccgggcagccaaatatggtgatcgcattgccattacatgcggaaacacccattggagctatcgagagcttgacacaagggctgatcgcctggctgccggatttcaaaagctcggcattcaacagatggatcgtgttgtggtgcagttgccaaatatcaaagagttttttgaagtcattttcgcgcttttccgtctgggggcgcttccagtcttcgcactgccttctcatcgaagcagtgaaattacatatttttgcgagtttgctgaagcggctgcatatatcattcccgacgcttattccggttttgactaccgttcgcttgccagacaggttcaaagcaagctgccgactttgaaaaacatcattgtcgcaggtgaggcagaggaatttttaccgctggaggatttgcatgcagaacctgtaaaactgcctgaagtcaaatcatcggatgtggcgttcctccagctttctggcgggagcaccgggctatcgaaactgattccgaggacccacgatgactacatatacagcctgaagcggagtgtggaggtctgctggctcgaccacagcacggtgtacttggccgcgctgccgatggcacacaattatccgctgagctcacccggcgttctcggcgtattatacgctggaggaagagtggtattatctccttctccaagtccagatgacgcatttcctttaattgaacgggaaaaggtcacgataaccgctcttgttccgcctcttgcgatggtatggatggatgcggcatcctcacgccgtgatgatttatccagccttcaagtgctgcaggtcggcggtgccaagtttagtgctgaagccgcgcgcagggtaaaagctgttttcggctgcacgctgcagcaggtgttcggaatggcagagggtctcgtcaattatacgagattggatgatcctgaggagatcattgtcaacacccaaggaaaaccgatgtctccatatgatgaaatgcgtgtttgggatgatcatgatcgcgacgtaaaacctggtgaaacaggccatctgctgacgcgggggccgtatacaattcgaggttactataaggcagaagagcataacgccgcttcatttactgaggacggtttttaccgtacgggtgatatcgtcaggctgacacgagacggctatattgtcgttgaaggccgggcgaaggatcaaattaaccgtggaggagaaaaggttgcggctgaagaggtagaaaatcatctgctggcgcatccggctgtccatgatgcggcaatggtctccatgcctgatcaatttcttggcgaaagatcttgtgtgttcattattccccgggatgaagccccaaaagccgcagagcttaaagcatttttgagagagcgcggactggcggcatataaaatccctgatcgagttgaatttgtcgaatccttcccgcagacaggagtaggaaaagtcagcaaaaaagcgctccgtgaagccatttccgagaagcttcttgcaggatttaaaaaataaaacaacaatttgagaggaagtgttcatatggctatacctgccattcagccgtatcaaatgccgacagcatctgatatgccgcaaaacaaagtatcatgggtgcctgatccgaatcgggctgtcttgttaatacacgatatgcaaaactattttgttgatgctttcacagcgggagcgtctccggtaacagagctttcagcgaatatacgaaagctgaagaatcaatgtgttcagcttgggattcctgttgtctataccgcacagccgggaagccaaaatccggatgaccgtgcgctgctgacagacttttggggcccgggattaaacagcggtccttatgaggagaaaattataaccgagctggcaccagaggatgatgatcttgtgctgacaaaatggagatacagcgcgtttaagagaacgaatctgcttgaaatgatgcgcaaagagggacgcgatcagctgatcattacaggaatttacgcccatatcggctgtcttgttacagcatgtgaagcatttatggaggatattaaagccttttttgtgggagatgcagttgctgatttttcattagaaaaacatcaaatggcgctggaatatgcggctggacgctgtgcgtttaccgtgatgactgacagtcttcttgatcagctgcagaatgcgccggcagacgttcaaaaaacgtcagcaaacactggcaaaaagaacgtgtttacatgtgagaatatccgtaaacaaattgctgagcttctacaagaaacaccggaagacatcacagatcaagaggatttgctcgatcgtggtcttgattcggtaaggatcatgacattggtggaacaatggcgccgtgaaggggcagaggtgactttcgtggaattggctgaacgcccaacgatcgaagaatggcagaaattgctcacaactcgcagccagcaagtgctgccaaacgcggattatttataaaaggagggtaaacaaacggatgcctgatacaaaagatcttcaatattctttgaccggggcgcaaactggcatatggtttgctcagcagcttgatccggacaatccaatctacaatacagcggaatatatagaaatcaatggaccagtcaatattgctctttttgaagaagctttgcggcacgtgatcaaggaagcggaatcgctgcatgtccgcttcggtgaaaatatggacgggccttggcagatgataaacccgtctccggatgtacagctgcacgtcattgacgtcagctctgagcctgatccggaaaaaacagcattaaactggatgaaagctgatttagcaaagccggttgatttagggtatgcccctttgttcaatgaagctctgtttattgccgggcctgatcgtttcttttggtatcagcgcattcaccatatagcgatcgacggcttcggtttttccctgatagcccagcgtgtggcaagtacatatactgcccttataaaaggacaaacagctaaaagccgttcctttgggtctctccaggccattttggaggaggatacagattatcgcggatcagagcagtatgagaaggatcgtcaattctggctggaccgttttgcagatgcacctgaagttgtgagcttggctgatcgggcgccaagaacatctaacagttttcttcgtcatacggcatatctgcctccgtctgatgtaaacgcgttaaaagaagcggcgcgctatttctcaggaagctggcatgaagtcatgattgcggtgtcagctgtttatgtgcaccgtatgaccggctctgaggatgttgtgctcggcctgcccatgatgggtcggatagggtccgcgtcactgaatgtaccggctatggtgatgaaccttctcccgctccggctgacggtaagctcttcgatgagcttttctgaactgattcagcaaatttcccgggaaatccgcagtattcggcgacatcataagtatcgccatgaagagcttaggcgcgatctgaaattgataggagaaaatcatagattatttggccctcaaatcaatcttatgccgtttgattacggtctcgactttgccggcgtccggggcacaacgcataatctttcagccggtcctgttgatgatctatcaatcaatgtatatgacagaacagacggcagcgggctgcgaattgatgttgatgcgaatcccgaggtatacagtgagtctgatattaagcttcatcagcagcgtattttgcagctgctgcaaacggcttctgccggagaggacatgctgattgggcaaatggagcttctgttgccagaggagaaagaaaaagtcatttctaaatggaatgagacggcaaaatccgagaagctggtcagccttcaggacatgttcgaaaagcaggcagttcttacgccagaacgtatcgctctcatgtgtgatgacattcaagtcaactatcgaaagctcaatgaagaggcaaaccgcctcgcgcgtctgttgatcgaaaaagggattggtccggagcaatttgtcgctttggcgctgccgcgttcccctgagatggtggcttcaatgcttggtgtgctcaagactggtgcggcgtatctcccccttgatccggagtttccagccgaccgcatttcttacatgctggaggatgcgaaaccttcatgcatcataacgactgaggaaatagcagccagtctgcctgatgacctggctgtacctgagcttgtgcttgatcaggctgttacacaggagattataaaacgctattcgccggaaaatcaggatgtatcggtttcgcttgaccatcctgcgtatatcatctatacctcaggatcaacaggaagaccgaagggagtcgttgtgacacagaaaagcttaagcaattttctgctgtctatgcaggaggcattttctctaggagaagaagacaggctgttggctgtgacgactgtcgcttttgatatttcagcattggagttatatcttccgctgattagcggagcgcaaatcgtgatcgcaaagaaagaaacgatccgtgagccgcaggcattagctcaaatgattgaaaatttcgatattaacattatgcaggcgacaccgacactgtggcacgctttggtaacgagtgaacctgagaaacttcgggggcttagagtgcttgtaggaggcgaggcgctgccgagcggtcttttgcaggaacttcaagaccttcattgttcagtcacgaacttatacggtcccactgaaacaacgatttggtctgccgcagcttttcttgaagaagggctgaagggcgttcctccgattgggaaaccgatttggaacacgcaggtgtatgtgcttgataatggattgcagccggtgccgccgggcgttgtcggagagctttatattgcaggaaccggcttggccagaggttatttccatcgtcctgatttaacggcggagcgcttcgttgcagatccatacggaccgccgggaactcggatgtatcggaccggagaccaggcccgctggcgcgccgatgggtctttggattatatcgggcgggcggatcatcaaatcaaaattcgcggattccgaattgaacttggagaaattgatgccgtgcttgccaatcacccgcacattgaacaggccgcggttgtcgtacgggaagatcagccgggagacaaacgattggcggcttatgtagtcgctgatgctgctattgatactgcagagcttcgtcgttatatgggggctagtcttcctgattatatggtaccgtcggcgtttgtggagatggacgagctgccgttaacacctaatggcaagcttgaccggaaagcactgccggcaccagacttcagcacatctgtcagtgatcgggccccgcggactcctcaggaagagatattgtgtgacttgtttgcagaggttctcggtttggcacgcgtcggtatcgatgacagtttcttcgagcttgggggccattctcttcttgcagcccgtctgatgagccgcattcgcgaggtaatgggagccgaacttggtatcgccaagctctttgacgaaccgacagtagccggactcgctgcccatcttgatttggcgcagagtgcatgtcccgctttgcagagagctgagcggcctgaaaagatcccgctctcatttgcccagcgccggctatggttcctgcattgtctggaaggaccgagtcctacttataatattccggttgctgtccgtttgtcaggtgagttggatcaaggattgctgaaagcggcactttatgacctcgtctgccgtcatgaaagtcttcggacgatcttccctgaatcacaggggacatcctatcagcatattttagatgccgatcgagcctgtcccgagttacatgttactgaaattgctgagaaggagctttctgatcggcttgccgaagctgtacgctacagctttgatcttgcagctgaacctgcttttcgtgccgagctttttgtgatcggtcctgacgagtacgtgctgcttcttctcgtccatcatattgtcggggacggctggtccttaacaccgctgaccagagaccttgggacagcttatgcggctcgctgccacggacgatctcccgaatgggcgcctcttgctgtgcagtatgcagactatgcgctttggcagcaagaactgcttggaaacgaggatgatccaaatagcttgattgccggacagcttgctttctggaaagaaaccttgaaaaacctgcctgatcagcttgaactgccaaccgattattcacgtccggctgagccgagtcatgatggagatacgattcattttcgtattgagcccgagtttcacaagcgattgcaggagctggctcgcgcaaatagggtgagcctgtttatggtgcttcaatccggtctcgccgctttattgacaaggctcggggcgggcaccgacattccgatcggcagtccgatcgcgggacggaatgatgatgcgctgggcgatcttgtagggctgttcattaatacattggtgctcagaactgatacgtccggtgacccaagctttcgtgagcttctagacagagtacgggaagtgaatctggccgcctatgacaatcaggatctgccgtttgagagacttgtagaggtgctcaatccggctcgttcgcgtgcgacgcatcctttattccaaatcatgcttgcgttccaaaacacaccggacgctgaactgcatcttcctgatatggagagcagcctgcgaatcaacagtgtcggttctgccaagtttgatttgacgctggaaattagtgaagatcgccttgctgacgggacaccaaacggaatggaaggactgcttgaatacagcactgatcttttcaaacgggaaactgctcaggctcttgctgaccgattgatgcgcctgttggaggctgccgagtctgatcctgacgagcaaatcggaaatctggatattcttgcgccagaggaacacagcagcatggtgactgattggcaaagtgtatctgaaaagattccgcacgcatgtttgccagagcaatttgagaagcaggctgctttacgtcctgatgccattgccgttgtatatgaaaatcaggaactgagctatgcagagctgaatgaaagagcaaaccggcttgcccgaatgatgattagtgaaggtgtcgggccggagcaatttgtggcattggcactgccccgatcgttggaaatggctgtcggcctattggcggtgctaaaggccggggcagcttatctccctcttgatccggattatccggctgatcgaattgcttttatgctaaaagatgcacagcctgcgtttatcatgacgaacactaaagctgcaaatcacattccgccagttgaaaacgtgccgaaaatcgtgctggatgatcccgagctggcagagaaactaaacacgtaccctgcaggtaatccaaaaaataaggataggactcagccgctttcccctttgaatacggcatatgtcatttatacatccggctcaacaggtgttccaaaaggtgtgatgattcctcaccaaaatgtaacacgtttatttgcagcgaccgagcactggttccgtttcagctcaggtgatatctggaccatgttccattcctatgcgtttgatttttcggtgtgggagatctggggtcctctgctgcatggcggacgtcttgtaatcgtgcctcaccacgtcagcagatcgccagaagcgtttctgcgcctgcttgtcaaagagggggtgactgttctgaaccagacaccgtctgctttctatcagtttatgcaggcggaacgggaacagccggatctcggacaggcactcagtctgcgctatgtcatttttggcggagaagcgcttgaactcagccgtttagaggattggtacaaccgccaccctgaaaatagaccgcagcttatcaatatgtatggtattacagaaacgacggtgcatgtgagctatatcgaattagaccgaagcatggcagctttacgggcaaacagcttgatcggctgcggcattcccgatcttggtgtatacgtgctggatgaacgcctgcagccggtcccgccgggtgttgccggagagctgtatgtatcaggagcggggttagcacgaggttatctaggccggcctggtttaacatctgaacgcttcatagctgatccgttcggtcctccaggcacccggatgtaccgcactggggatgtggcccgcctccgcgctgacggttctctcgactatgtcggccgtgcagaccatcaagtgaaaattcggggattccggattgaattgggagaaattgaagccgcgcttgttcagcatccgcagcttgaagatgcggcagtgatcgttcgtgaggatcagccgggagataaacggttagcagcttatgtcatcccttcggaagaaacatttgatacggcggaactgcgcagatatgctgctgagagactgccggattacatggtgcctgctgcctttgtgacgatgaaagaattgccgctgacaccgaatggaaagcttgatcgtaaagcgctgcccgctccggatttcgcagcggcagtgacaggacgaggaccgagaacgccgcaggaagaaattctctgtgacctctttatggaggtgcttcacttgccgcgtgtcggcattgatgaccgtttctttgatttaggcggacattccttgcttgctgtacagctcatgagccgcattcgtgaagcgctcggcgttgaactcagcatcggcaacttgttcgaagcacctactgtagccgggctcgctgaaagacttgaaatgggatcaagccaaagcgctcttgacgttctgctgccgctccgaacaagcggagacaagcctcctttattctgtgttcatccggcaggggggctcagctggtgttatgccggtttgatgaccaatataggaacagattatccgatctacggcttgcaggcacggggaatcgggcagcgcgaggagcttccgaaaacacttgatgacatggctgccgattacattaaacaaatccgaacggtccagccaaaaggcccgtaccatctgctgggctggtccctgggcgggaatgtcgttcaagcgatggctacccagctgcaaaatcaaggagaagaagtatccctgttggtgatgctggacgcctatccgaaccacttccttcctataaaagaggcaccggatgatgaggaagcgcttattgcccttctggcgttaggcgggtatgatccagacagcttaggggaaaaaccgctagattttgaagcggcgattgagattcttcgccgtgacggcagtgcgcttgcgagcctggatgaaacggtcattttaaatttgaagaatacgtatgtaaattctgtcggcattttaggttcctataagccgaaaaccttccgcggaaatgttttgtttttcagatcaacaatcattcctgaatggtttgacccgattgaacctgactcgtggaagccttatattaacggacagattgaacaaatcgacatcgactgccgtcataaagatttatgtcagcctgaacctctggctcaaatcggcaaggttctcgctgtcaaattggaagagttgaataaataagggaggagaaatagaatggcaaatccttttgaaaatgcggatggcacatatttggtgctggtcaatgaagaaggccaatattccctatggccgggttttatagatgtgccgagcggctggacagtcgttcatgagcaaaaagggcgtgaagcttgtttggactatatccaatcgcattggagcgatatgaggccaaacagcctaaagactgttgaaaatgtgtaatcttatcaaaaagagactgcttgccgcagtctctttttctatcttacgcagacgtttgggtatgatcacaatctctgacagggtttccgttttcatcggtacaccaagattgggataaaaacgctaaaaacacagcggcccactgatctgcaaactgaatcagaatacccccgtcatgccaagagccgttgtcttttttccagcgggtatccattgcattcccttgattcatatggatattgtgcattccgttagtcggggtaaagccgaatattttatctgcagcctgttcagggccgaattttgaaccgaatatataaaccggcgttttctcatcttgtgctttcttcatataggtttcaataaaatcatttaaatcattatcaggtcccgtgatttcatgaggcaaaggcttcatttcccgcgggtcaaacaaattgccccgcacataatccagtgccacttcacggtttgcttcattgatccttgtatatccatacggcatgttcggaaggatggtaattgagcccgaatcaaactgatcgtcagccaaatacaatacttcagattcctcagaactggacatcacattgatggcgcacctgtaatacgtattctcttcaccgagcattttgacttggaaatgaggactgtcatcatctgtttcccgcttcatgtctaatactatgccttttaacacgccatattgctgaacagccatatgaatcctcctttatgatcaacttcatagtcataattcgtgaaatggtctcttttttccttttaaaaaataaaaaagcctgcagaaatctttctgcaagcttattgtgaattaagcacccgccacagatgattcatcctgtaaagctttctcggcaggaacatactcatagcctagatctcttgctacagcttcataggtcacgtgtccgtttgcggtgtttaaacccgctctcagtgccgtattgtctgcgagcgcttttactgcccctttgttcgcgatttgcagcgcgtatggaacagtaacgttagtcagggcgattgttgatgtacgagggactgcgcctggcatgttcgctacagcataatgcacaaccccgtgtttttcatatgttggctgatcatgtgttgtgatatggtcgacagtttcgacgatgccgccttggtcgatcgctacatcaacaataactgaaccgggtttcatttgttttaccatttcctcagtgacaagagtcggagctttagcacccggaattaataccgcgcaaatgaggagatccgcttccgccacagcatcagcaatattgaccggattagaaattaacgttttaatctgatggccgaagatgtcatcaagctggcgcaagcggtctgcgtttaagtcaatgatcgtcacatctgcaccgaggccgacagccattttcgccgcgtttgtcccgacaacgcctcctccgataattgttacttttccgcgggaaacgccaggcaccccggcaagcagaatgccttttccgcctttaggcttttctaagaattgagcgccgatttgcgctgccattctgcccgcaacctctgacattggcgtcagaagaggcaatgtccggccttcactgaccgtttcatatgcgatggcagttactcctttatccttcaaggcctgtgcaagctcaggctcagctgctaaatgaaggtacgtaaacagcacaagtcctttgcgaaaataaacatattcttccggcagcggttcttttactttcatgaccatttcggcgtcccagacctgcttcggatcagcaatgatttccgctcctgctgactcataggcttcattttcaaatccgcttccaaggcccgcgcctgtttcaaccagcacccggtggccgtttgaaatgagctgagaaacgcccccgggtgttaatgcgacacggttttcattgttttttatctctttaggaacccctatgatcatatctgtctcctcctgtatatgtgatatttttagtgtagcttgatattttggaaaattctttgtttgattaagaaaataaaaaaacatggatttgtgaaatttcacaaatccatgtgccgaagtttgatatctaaatagatggtgaatttttgattcacatttttcaaatcaatttcagcgatctggctgatccgcttgagtcggtaattcaacgtattaacgtgtatatttaacagcttggaagcggtattcacgttgctgtccgcttcaataaagcgctctagcgtctctaccatatttgactggtgatcccggtcatattgttccagtttggaaagcgagtaattataatggcccgcctgtttccgtttttcatttaagacatctaagtattgataaatgcctaactcagaaaagctgaaaagatgtttggtctcttcagcgaaccgttccttcgtttttaagacggacaatgcttcctgataggagcgggagacaaaagaaatagagttgtatattccgccaaaagcgatagaaacgtcttctattttataccgctccttcagctgtttttgcgtacttaaagcaaactgttttaaatcttgaaaaggatgatctgttttgggtgaggttaatataataagttcattggaatctacggtcgccagcagcacgtaaacctgctgggtcgtttcctgtaaatattgcagctgctgttcgattttttcagtcagctcgccatttatgcggatgatcataacggaaaactctgaaggagcggccattccaagcttatggaacccatccgccatatcatcctcctgatggatgtgtccggtcagcattttccagaaaaattcttggctgcgttcttcatttttcgtttttctgatttgaagtttgagaagcttgtttttcactgcttttgctgccatttgcaatgtcagcagatcttcatcggacaatgttttttggatctcaagcgcccatatgaagccaagtacttgcttgtttttccaaatcgaaatagcgacgcgattgctcagcccgacttcatcgatttgcttgactctgatcggctggtccgtttttaagagagcaggaattgtcccgtctttccacagcttgttaatcaccttctccggtacccttctgccaataatggtagacgtccgggcagggtctgtgcagtcgctgtgtgtactgtaggcaagcagcttgtggttaacatcctctatggtgatcgggcaccgcagaacgtcgctgatatgatcagccacatcttcaagtctgtcaaaactatatttaaacggatcattcggcatggtcataaatctccctacttttcgtgcttgatttctctttgacatctcatccccttccttttattatgattgttgttgtttgtgaaaatcaacaacaaagaacagaagcaaaaaaacaatttcatgagagaaacgttctatatacatttggcggtgtaatcgcctttttgcaggacagtgtatgtctcatataatacgacagcttatcctattaatcttctaagaaagtcatcggaggcaagactaattaaggaaagaaaaaactgaacctttcagaaatggtgctgtagcatcaaattttctgaaaggttttttttgggagttggagagttatttgggtcttttggattattcggagaatgaagagaagattaagaaaataaacctatttactttacagtatatgtcatttttgagtgattcggggtaaaccattggactcattttgtaaaattaaaacatatttgtttgactatgccgaaaaactgtttttataataatgacgttctaaaaataagtgaattagcccatatttaggctgatggcacaggaggtaatgaggaatatggcaggattaattcgtgtcacacccgaagagctaagagcgatggcgaagcaatacggcgttgaaagccaagaagtattaaatcaggttgatcgtttaaaccgaatgatctctgatttgaaaagcatgtgggaaggtgcttcaagcgaagcgttcgcagatcaatacgagcagctcaaaccttcatttatcaaaatgtcagatttgcttcaagatgtgaatcagcagcttgatcaaacagcaaatacacttgagtctactgaccaagacatcgcaaatcaaatccgcggataacagtatgaaagggaaggagcgcctgattcaaaagaagacggcgctctttctatgtaagggtgatcctaaatgtatattgatattacaatagatttgaaacattataacggcagtgtctttgatctcagattgtcagattaccacccggtgaaaaaagtaattgatattgcttggcaggcccaaagcgtatctatgcctccgcgcgaagggcactggatcagagtggtgaacaaggataaggtgttttccggagaatgcaagctgtctgattgcggcattacaaacggagaccggcttgaaatattatgaaaggatctggttgaatgtcaggtgaacaaaaatcatatttagaaaaccaattagaagctgttgccgagaaaacagatgccggctatacatttacctttcaacgggaaaaaataaagcttctcgacggtcttgaagctaacgtgatcaaagatataaatccattttttcataaagaaatcgatgtgacggatgatgaagtaatcatcacaatccaacctccctcctcctataaagcattccgcttcatgaaagctaaggataaaaaaagtaaatggcagtttgcctatcagcttgttcaagccgtacagcagcacaatctgtcgaggctgaatttgattgtcgctcctgaaaacattgtattcgataaagggcttacgccttattttctccattatggagtaaaagaaagcattcctccttacgagcgtgatgaggaaagagtatggcaggagctgaaagcggcagcggctttggcagttgacggcgcttttgcgtttgaagactacctgaaattcaatgaaacgctgacgttctccgcagaggcaaaggcgatattagatgctgaatcctatgatgatttgctcgagctgattcaaacccatattgatgagctcgaagccaaagcaaaaacatacatacatatcccgagaaagaagtggaacatccagcgatatatcggcctggggctcattgttttgcttgtaccggcacttatttattcgatgtacgccttatttttcgcgcagccaaagcaccaggcgatagtggacagcaaccgtgcgttcttaaacaagcagtacagtgaagtcatcagcacactgtccaagtacgatgcggaaagcctgcctgaatcggtgcagtatcagctggcgacgtcctatgttgaggtcgaaaacctggggagtgcaaaaaccaaaaatatagaaaataatttagtcacccttcaatcagaccctcagcatttcttatattggattgattatggtcgaggagaatacaaagaagcgatcagtatcggccgtaagctggaatacaatgattatatttactttgccctagctaaatataaacagcagcttttatctgaggatacaaatgatgaagacatacaaaaagaacttgattcagtaaatagtgagcttgaaaaagcccaaaaagaacgtcaagaaaataaacagtctaattctgaaacatcgttagtcgatacaagcgaagaacagacacaaacagacgaagaaaaacaagcagaagagaaagcggcagaagaaaaagccgcagccgaggaaaaagcgaaaaaagaagaacagaaggaaaaagaagacgagaaaaaagaaacagaaaagaaagatgagaaaaaagatgacaaataacgtgagacatgaagcgcaggtcatcgcatgctgccattcggccgtaagggggttcgccatttgagtctattatgggttttttaccaaaataacgttcaaaaattaaatctgtctaacctcccgtcgtctcatccggtgaccatagggcctgatgtgaaggattctgttacgatcagcaccattccatttaatagcggagtgatttctcttaaaagaaaggaatccggcggccaatacgaagttttcctgggaaatgattgtctcggcacgattgagacggatatatcatttactctccaaacggatcagcaggatatacgcttgatattgacgggcagtgaacctgagaaatccgtttattttacgggaaatcgggatgaaattgtatgttcctcagaaaaaacgaatgcagatatttatctgaatccgcaagattttgcatttgcagaacaaagcacgttttctttgctccgtgcaggcggcagctggtcggtccgccctgaaagcggaacgatcttcttgaacggagagaaaatcaacgccaatacgccgctcaagccgggggatgaaatattctggaacttcacgcaaatgagggtgacggaacaagaccttttagaaattgttcattatgcccagtttgaaacagcgttaacagaaacggtcaaaccgagtacagagatgcagaaaaaatatccgcagtacagaagaacgccgcggatggtatacgatctgccggatgaccgcgtttctttcagttttccctctcaggagagcgatcaaaccaacagagggctgtggctcgtcatcctgcctccgcttgtgatgctgatcgtgatgggcgtagttgccatcatccagccgcgcggcatatttatactcgtttctttggcgatgtttatgatgactctcattacctcgacagtgcaatatttccgtgataaaaaccagcggaaaaaacgcgaggaaaaacgggagcgtgtatataagctttacttagacaataagcggaaagagcttcaggcacttgctgaaaagcaaaagcaggttcttgaatttcactttccttcatttgaacaaatgaaatacttaacaagtgaaatcagtgaccggatctgggaaaaatcacttgaaagcaaggattatctccagctgcggcttgggacgggaacagttccgtcaagctatgaaatcaatatgagtggcggagacttggcgaatcgtgatatcgatgacctcatggagaaatcgcagcacatgcaacgcgtctataaagatatccgtaatgcgccggtgacggtcgatttggcagaaggtccgatggggcttgtcggtaaatcacaaattgtgaaaaatgagattcaccagctaatcggacagctgtcgttctttaacagctatcacgatttgcgtttcgtatttatttttcatgaagaagagtataaagactgggagtggatgaagtggcttccgcaatttcaaatgccccatatttatgcaaaaggatttatttataatgagcaaacccgagatcagctcctgtcttcactttacgaattgatcagagagcgtgatctcgaagatgacaaagaaaaactgcagttcaaaccgcattttgtatttgtcatcacgaatcagcagctgatctctgagcatgtcattctcgaatatttagaagggcagcatgagcatctgggcatctcgacaattgtcgctgcagaaacaaaggaaagcttgtcggaaaacattacaactcttgtccgctacattaatgagcatgaaggcgacattttaatacaaaagaaaaaagcggtaagaattccgttccgtctcgatcatcatcagcgtgaggataacgaacggttttcacgcacactgcggacgctgaaccaccaggtcggcattacgaattccattccggaaacggtatcgttcctggagctttttcatgcgaaggaagtaaaagaaatcggcattcagcaaagatggctgacaagtgaatcgtcgaagtcgctgtcagtgccgatcggctataaagggaaagatgacattgtgtatctgaaccttcacgaaaaagcacacggtccgcacggcttgcttgcggggacaacgggatcagggaaaagtgaatttctccagacctacatcttgtcacttgcagtgcattttcatccgcatgaagcggctttcttactaattgactataaaggcggaggaatggcgcagccgttccgtaacattccccacctcctcggcacgatcacaaatattgaaggaagcaaaaacttcagtatgcgtgcgcttgcttccattaaaagcgagctaaaaaaaaggcagcgcctgtttgaccagtatcaagtcaatcacatcaatgactatacaaagctatacaagcaagggaaagcagaagtggcgatgcctcacttgttcttaatttctgatgagtttgccgagctgaaaagcgaggagcctgattttatcagggagcttgtcagtgccgcgcgtatcggacgaagcctcggcgttcatttgattttggcgacacagaagccaggcggcatcatcgacgaccagatctggagtaactcgcgctttaaagtagcgctcaaggtccaggatgccaccgacagtaaagaaattttgaaaaacagcgatgccgcaaacattaccgtaacaggccgcggctatttgcaggtcggaaacaatgaagtgtatgagctgttccaatctgcatggagcggggcgccttacttagaggaagtctacggtaccgaggatgaaatcgcgatcgtcacagatacgggtctgatcccgctttctgaggttgataccgaagataacgcgaaaaaagacgttcaaaccgaaatcgaagctgtagttgacgaaattgaacgcatccaagatgaaatgggaatcgagaagctgccaagcccttggctgccgccgcttgcggaacgtattccgcgcactcttttcccttcaaacgaaaaagaccatttccactttgcgtatgtcgatgaacctgatctgcaaagacaggcgccaattgcttataagatgatggaagatggaaatatcggcatcttcggctcttcgggctacggaaaatcgattgcagccgcaacgttcctgatgagttttgcggacgtatacacacctgaagagcttcatgtctatatctttgatttcggaaacggaacgctgctgccattagcgaagctcccgcataccgcggattacttcctgatggaccagtcaaggaaaattgaaaagttcatgattcgcatcaaagaagaaattgaccgccgtaaacgtttgttccgggaaaaagaaatcagccacatcaaaatgtacaatgcgctgagcgaagaagagcttccattcatttttatcaccattgacaactttgacattgtcaaggatgagatgcatgagcttgaatcggaatttgtccagctttccagagacggacaaagcttgggtatctactttatgctgacagcaacgcgggtgaatgctgtccgccagtcattgttaaataacttgaaaacaaagattgtccattatctcatggatcaatcagaaggatattccatttacggccgtccgaaattcaatcttgagccgattccgggacgcgtcatcattcaaaaggaagagctttatttcgcgcaaatgttcctgcctgttgacgccgatgatgatatcggcatgttcaacgagctgaaatcagacgtacagaaacttcaagggcgatttgcttcaatggagcagccggcaccgattccgatgctgcctgagagcttgtcgacgagagaattgtctatccgcttcaagctggaacgcaagcctttatctgtaccgatcgggcttcatgaagaaacagtcagcccagtctattttgatttgggcaagcataagcactgcctgattttaggccaaactcagcgcgggaaaacaaacgtcctaaaagtcatgcttgaacatctgattgatgatgaaaccgaaatgatcggcctgtttgactcgattgaccgcggcttatctcattatgcgaaggaatcagatgtttcatatttggaaacgaaagaagatattgagcagtggattgaaacagcagaagacattttcaaaacaagagaagccatgtatgtagaagccgtccgccaaggagacgcacaaaatctgcgattctcacaagtcgtgctgatgattgacgggataacgagattccagcagacgattgatacgagaatacaagatcgtctcgctaacttcatgaaatcatacgctcatcttgggttcagctttatcccgggcggaaaccacagcgaattctcaaaaggctatgactccttgacgactgagatgaagcaaatccgccacgcgattctgctgatgaaaaagtctgagcaaaatgtcattcctctcccgtaccaaagacaggagcctgagattcagccgggcttcggatatgttgtggaaaacgggaaggagcaaaaagttcaaattcctttatgttctgctgaaagggagagtgctagatgacagaacaacgaaaaagcttgatcaagttaatatccgccgtcatcatcattttgctgctgccggtgttgtttttccgatttatcggagacgacccaacgaaaaaagcagtcaattctacccggcaaatcgcggtggtgaatgaagacacaggcgtattgagtgatgaggtaaagtctgatgaagaggacaaatccgcccagttcggcaaggaagtagcggccgttctgggtgaacgtcctgattattcgtggacggtcgtaaaccgaagcgcggccgagaccggtctcgcttcaaagaaatacgatgcgattgtctacattccctcagacttctcaaaaaacattttgagctatgacaaagaccatcctcaaaaggcaacgctcgaattcagcattcaagataacctgaatgcggttaacaaagaaaaagttcagcgtgagcttgaggatgcccaaaagacaatgaacaaaaaaatgtcggccttatactggaattttgtttcgcaaaaagtggacaacatcagaggagaatttgacaagatcgtcaataaagaatctgaattccagaatgtcatgtacaacttttacaaaccaagctctaatgatttagcaggtgaaatcaaacagcaaaaagacttaatcgatgagctgaagaaatcaatgaatgaagcgcaaggcacgacaaaagaaaaagcttctacggcggaggaagccaaaaacacgctgaaagaattcattgatacagttgaaaggtacaaagaatatcaagagaatcagaaaaagctgcttttggcagcccaggattcaacacagcagcaaatccggacaggtctggatgccatccaggcacagcaaaaggcgaatcagttcagcgaacgcatgagcggattggcaaccgggatcggccaagcgaagacacaaataggactgacaaaccttgcgttgaacaatgctgaaaagttaaggcaaaatcaagtgccattgcaagaaatgggtatgaaaaaaattgagaatgacatgtttaatgcatttctatctcgatataaaagtcaatatgaagctattaaatatcaaaatttaaatcaattgcaagagaatatcgggaagaaccgccttagtttacttaaacctaaggaaagcgacgaaaaggaagatggagaagacacatctgataataaagatgacacagataaggaagatattgaagatataaaattggatttagagaagcagcgggatgagctcaaaaatgttgcaactgaaattaaagatatctctgaagggttaaaagaacctgaacaagaaaaaccaacaacacccgatgctgaagaaccatcaaccgatgattctcctaatactgaagaaccgtcgaatgatattccaacatccgatgatcagccaacaaatgaagatactggctcatcagaagagggtactcaagataatggatcacaaaatgatgttcaaactaacattgaaacgggacaaaaacatcaagaatcttcaaaaaacgttcctgaacaagatacaaacacggagaatacaggaacctctaaaacagatttctctttgattgaactcgcagatgaaaacgatggctcaaatcaaagtgatgggctacagggtgacggagctgacggtgaaactgatatttcaggtgcaaaaaaacgtctgaacgaagcagcgataaaattagaggaaatagaaaatgcacttcaagaaaaacaagaggaacataacaacaaactagagaaacatattgatgagttaaatcaagaaattaaagagttaaataaaacagtttcaaaattaaatgatcaaattggtgacttaacaaaaaagttggttgattttgataataatgtcaatgatgcttataggttaatatacaatttggaagacgaaataatacaaactttgcagagtagaggctatatagatcagaaagaaaaactaagttcaattttttcaagtagaattgaaactgataatatttctaacttgatgaagtattacaactctttaaatttatataagtctacgctaaatgataatctggatctaggctctttgactattattaaaggtgaagtcatccaagagcaagatggcaacgtccaatcagtcctggctctcacacctgaagaatcagccagctgggaagctctcaaaaacaacacgatgcaaacagatgaggatattaacagcttcatcgacggcatgaccaaatttgcggacgactacagcggctatatccgtgactctcaagcaggtgttctcgacgaactgacgaaaatctctgaaagtgccgcaaaagcgtcagaacagcttgtaacgggcgcaacacaggaatctgcgacgttcagcaacgatgggctgtctggtaccatggcactgagtgtccaagatacggtcggccaggaagtgctgcaaatgtcagacatgatgggttcattgtctgatcgccagtccggcatcattgattacacaaccaacatgcagcaaagcgttaatgatgttcaagcgaaagccgacaccttaaacaacaactgggggaaaaatgtcgcctccacgaaactcgtgcgaaatgacgtatacggcatactcggaaatacattagtagacgggcaaaacaatggctatgtatatgattacttagcgaatccgcttaaaatcagcggagaggttccggaagaaaaaattcagacggtacctccggttgtcatccttgtcattgtgttgatcagcagtctgttaatcggctatttcagctcgtattaccaaaacgcaccgcttctcgtcaaaggagcgttattcggaattctgaatatccttgtcggacttatgatcagcttgttcggcttgaatatttattcactgccggacgatcagacgattaagtggtcggtgtttacgattctattgctggtcgcaagctctgccttcatccggacggcattcagattcggatcaatccctggctgggttgcttcagcagcaatgatcctattctatgtcgcaccgcttattgatttgatcatgccgaactttacatttgaagatccggtttcgaaagtatatatcgacatccagtacggtactgggcacttgtttacaatgggaataacagttctgctgatcattacggtgattgccgtggctctgccgctgattatccggttgatggctgaacacacagcagaaagcgatgaaacgtatgaagcgtgatcgcagcatggaaaaggggatcatgatttgtatgctctccttttcccttttcataccctctgcagcggctgcccaaactgaagaaaatacagatgtcgcgccaaaccagtatgagaaaaaagacatcgaaatcgatacgaattatttgcatgaagatacctactatgaagaaaaaacagaactgcctgaggaacaaaaggatatcacttttgataaaccgaaggacaaggacgccgagctgataaaagatttgtttacatcaacaaatgccgaggattccaacacgattgcggcccagtcgaaacagcttggaattacttttgctgaaaaaccaatgacaaagacatcatcaacggaaacagaagatgaacaagaaacatcatcattgctgctgccgatgatctatgtcgtactgatcctgctcggaattgcaggcatcgtgttcctcatcccaaaagtcacagcgcaggaaaacaagaaggcgtaggccgcgtgcttgtgttgtgtaaaagaggtgccgtacaataataacggaaaaggaggtttccaatggaactttatatcatcaccggagcgtcaaaagggctgggtcaagccattgcattacaggctttagaaaaggggcatgaagtccatgccttatccagaacgaaaacagatgtctctcacaaaaaactaacgcagcatcaaatagacctcatcaatctcgaagaagctgaacagcaatttgaaacattgctctcatccatcgattcagatcgttattctggtattacccttattaataacgccggaatggtaacgccgatcaaacgtgccggcgaagcgtctcttgacgagcttcagcgccattatcagctgaacctgactgcgcccgtgcttttgagtcagctgtttacaaaacggtttgcttcatacagcggcaaaaagacggttgtcaacattacttcaggagccgccaaaaatccatataagggatggagcgcgtattgcagttcaaaagccgggctcgacatgtttacgaggacattcggatttgaacaggaggatgaagagctgccggtgaacatgatttcgttctcacctggagtgatggacactgagatgcaggccgtcatccgttcttcatcgaaaaaggatttccaccacattgaacgattccggaaattaaatgaaacaggaagccttcgcagtccggactttattgccggcacgctgctttctttactagaaaaagggacggaaaacggccgcatttatgatattaaagagtttttgtagagcagatattttctgctcttttttttatacaaaaggctgcagccagcgcattttattgaacagccgcatatactgactgaaacgttgcttttagggtataacaatgatgataagaagatcaaaatgatgtgacataagaattgagtttctctgcaaattatgttaggattctaaaaatatctaaaggaggggtttccatgagaaaggttacattaatggatgttttcacccatccaattgcacaaaaatatcttcagcgttccggcgtggcacatgcgattgcctgcgcttatcatgcatacaggctgtctgtgaaggctgacattaatcctgatttagcagcaaaagcggcactgcttcatgacattggccattatgaatggtatacagacggaaagtgggattatgagaaatacaaaagaaatgacattcatgccattaaaggggcggaacgggcgcataaacttctgattcggcttggcgaggaaccgaaagcagcaaaagagattgcactagccattttgcttcatacagattcctatttgcctgaaggcgaattagataaaaacacactgcagcagattgtcaaaaaagcggacgaactggatgaagagccgggcggccaccatcattaccgccaaattgatccttcaaccgcacgaaaaaaaatagaaaagctggaccaattaatcgaccaagcccaggcatccgtgataaagcctgtataagtacggaacagcgccagctttcttcgctgtctccgcttcatcgatacttcctttacacccgcctccaaacgtattctcctaaaatctccgcacccctttgttttatcaggtaagcctgtgtcattatccataagcgcggcataagctgagataaaacacacaaaggggataaaagtatggtcaaccaaggtagtccgcaactggtctctttagtcgatccttatgtctatcagaccattaaaaagctcatcggctcaaggttcgttatacagacagtacgagatacggtcagaggcagactgatcgatgtaaaacctgaccatatcacaattgaaggagcccgaaattctgtttgtttgatcagaatccagcacatgatttccgtcaccccagattacagtgagcgggtctaacagtgcttgcgcatgaaaaataggcgtacaacaggacgtcctatttttcagttaagcgctgtaaaaacgcactatgatacattgttccatcaaggtcaaagccggcaaattcctgatagtcaccatctgaaaaacagaaagtgacacggtacaccgtatagcaggaacggactgaagcatgctggcagacccgaaaatgataaccgtctgaatcttttacatacagccgggatttcccggcaaatggggcacagaggtgtgctgcctcaccaaaacattcgaatccggcgattttgccatcttggctgatatccagcaggagacaatcattgactctgagctcctcagtccgtacattcctgttctttttcggaggaagaacatagatataagccagttctgaatctgtatcgtatgtcacggccttcatcaccaacactcctttcattatattaagagttctgatatgagttcatttttgttacaatgatggggtataagttcttttatctgacagacaaagaaaaactaggaggaacaaagcttgttgaaatcaaaagtccatttttggacattgcagattttatttgttttgctgattatttttgtagcaacaaaagtttcatttgtatttcagccgtttattgtttttatctcgacattgtttttcccgatgctaattgcgggaattttgtatttcatatttaatccggtcgtccgcctgcttgagaaaaaaattccgcggacattatccattctattgatctatttactgtttatcggtttgcttgcctttatttcagcgtcagtcggacctatcatcaccgcacaggtgacagggctgtttaacaaccttcctgattatataaaacagattcaggcgctgacaaaggatttgtcccattctcaatggtttacctggatgatgaaccaggattatgtatcgatatcaaaaattgaacagtcattgacaagttttctccaaaacctgccgcaaaatatcacgtccagtttatctgcggtgtttggtgtcgtgacaaacatcacgcttgttattattactgttccatttatccttttttacatgctgaaagacggacaccgctttccgcatttggcagtaaaaattctaccggcttcttatcggacagaaggcttaaagatttttaaagatttatccgatacgcttgcggcatatttccaggggcagctgttaatctgtctttttgtcggaacagcgtgttttatcggctatttaattgccggactgccgtatgccctgattcttgggattgtcatggcgattaccaatatcattccctatgtcgggccttttctcggtgccgcgccggctgtcattgtcggttttatggactcgccggccaaagcgctgtttgcgattattgtggtcgtcatcgttcagcagctggacggaaacctgctgtctcctcttgtgatcggaaagcggctgaatacccatccgcttacgattattttgctattaatcggagcgggaagcttcggcggaattctcggcatgattttagcggtgccggtttatgcggtagtgaaggcgttcttcctgaatattgtccgcttgatcaagctgcgccagcggtcacgactcgaggaaaacgcaaagccagctgaataggcgggcaccattatcggctccttgcatatgatgctgtaaatcaatgcggaggtggggaaatgcctgcaattgtggggccgatttatatcatgtcagttacggataatgccgcggcaagctttggagacgtatttgcgatttcgcccaaaagcgtcgctcattcaggggcggggtcaggcacatttcagcttggtgattttgtgaagattaacaaccaaacgagtaaaactctcttcaaagatgccgatatcactgatgaaacagtttcgtttaacgggtaacagccttttcacaagaggctgttgcttttttattgtataatatgggtagtctttgaatagagaggtcatgttatgaaaatcagaaaagcaaatatcaatacgcaaaccggaatgatcacggacgtgtatctgcatgaaaacagaaaagaactgcgcacgcttgtagcggtaccgcagctggagtggagcacgatcatttcctatgaagaagataaagcaactctgcctgaacggctggaagcgtcgttgcgccggcatacagaggaaacccctgctggtgagctggccaaaaaaatcattcattgggtaacagaaatgtaaacggcgcttgaaagtttagctcctgcctgatcaggtgataatgaagacaaacaagacgggaggacaggcttttgagtgaagataaaatggatctctatttgcagcaaggaatgtatgggcctttggagacaaagcctgacgagcgccatttgtttttaggctctttaagagaaagagtcgttttggcactgacgaaaggacaggtgcttagaagcaaaccgtataaagaggcagagcacgagctgaaaaacagccataacgtcacccttttgattaatggagagcttcagtatcagtcttactcttcttatatccaaatggcgagccggtacggagtgcctttcaagattgtatctgatctccagtttcatacgcccttaggcatcgtcattgcggctgatatcgctgtgaatcgtgaattgatatatattcaggacgacatttataatcggtcagtactgaaatcgtaagagacaaacggaccgtttgtctttttgttcatggcaattcacttacaactggagataagatataatgttctcatactgatggcggggaggccggctatgaaaaaagcacttatttgtattgattatacgaatgattttgtggcgagtgacggaaaattgacctgcggggagcccggcagaatgattgaagaggcgatcgtcaatttaactaaagaattcatcacaaacggtgattacgtcgtattagcagtagattctcatgatgaaggggatcaatatcaccctgaaacccgtctttttcctccgcataatataaaaggcacggaaggaaaagatctgtacggaaagcttttgcctctatatcagaaacatgaacatgaacctaatgtttactacatggaaaaaacgagatattctgcttttgcgggaactgatttagagctcaaactcagagagcggcagattggcgaactgcatcttgccggtgtctgcacagatatttgtgtgttgcatacagctgttgacgcatacaacaaaggttttcggattgttgtgcataaacaagctgttgccagctttaatcaggaggggcacgcatgggctctttcccattttgcaaacagcatcggagcgcaagtggcagagtaaggaaggggaaaaacagtgttagagtacggatttaaagatgacagcctgtcattacatacagacctttatcagatcaatatggcggaaacgtactggagagacggcattcatgaaaagaaagcgatttttgagctgtttttcagaaggcttccgtttgaaaatggctatgccgtatttgcgggcttggaaaaagccattgaatacttggaaaatttcaagtttacggatagcgatttgagttatttacaggatgaactcgggtatcatgaagattttattgaatatttgcgcggcttatcttttacaggttcactttactccatgaaagaaggagaactcgtttttaacaatgagccgattatgagggtggaggcacccctggtagaagcgcagctgattgaaacagctttgctcaacattgtgaactatcaaacattaatcgcaacaaaggctgcccggattaaaggcgtcatcggtgatgaagttgcgcttgaattcggaacaagacgggcgcacgaaatggatgcggccatgtggggagcgagagcagccttaatcggcggctttagcgcgacaagcaatgtaagagccggaaagcgctttaatatcccggtttccggcacacatgcgcatgcgcttgtgcaggcttaccgcgatgaatatacagctttcaaaaaatacgcggaaacacataaggattgcgtcttcttagttgacacgtatgacacgcttcgttcaggcatgccgaacgcgattagggttgccaaggaattcggcgaccgcattaatttcattggcatccgtctggacagcggcgatttggcgtacctgtcaaaaaaagcccggaaaatgcttgatgaagcaggatttacagatgcgaaggtgattgcttcaagcgatttggatgagcacaccattatgaatttaaaggctcagggagcgcgcattgatgtctggggtgtcggtacgaagctgatcactgcctatgaccagccggctctcggcgcagtttataaactcgttgccattgaagaagacgggaaaatggtcgacacgatcaaaatttcgtccaatcctgaaaaagtgacgacaccgggcagaaagaaagtctaccgcattattaatcagtccaaccatcattctgaaggcgactatattgcgctttatgatgagcaggtgaatgatcagaagcggctcagaatgttccacccggttcatacattcatcagcaaatttgtcacgaatttttatgcgaaggatcttcatgaactgatttttgagaagggtattctttgctaccaaaaccctgagatttcagacatacagcagtatgtgcaggataacctcagcctgctttgggaggaatataagagaatcagcaagccggaggaatacccggttgatttaagcgaggactgctggagcaataaaatgcagcggatccacgaagtgaaaagcagaattgaagaagagcttgaggaagaataaagaaaaactggcctttcattcgcgaagggccagttttctttatgtatatattatttttcatgtttagacaattttcgtcaaattatttgatatacttaggggtgaaagccgcgcgtattgtaagggggataaatcaatgagggtgtttgttgcaagacagcctatttttaatagaaaagaacaggttgttgcttatgaactgctgtatagagaaagcgaagagaacgtgtatagcgctaaagacggcgatcaggcaacaacagatttggtgatcaacagctttttaaacatcggaattgagaagctgacggaagggaaacgctgttttgttaattttacggaaagcctgatgttttcgaatcttcccacctccttcaatccgaaacagcttgtcattgaaatccttgaagatataccgatcacgccggccctcatttctagatgcaaagaattgaaaaaaatggggtatatgctggcgcttgatgatttttatgcaataaatccgcaagatgaggacttactggaaaaactcatgagctatattgatatattgaaaattgattttctcaaaacaacacgaatggaacgcagaacaattttgcaaacctacggctgccgcggcctgatttttttagcggaaaaagtagagacccgaaaagaatataaacaggcggtccaagacggctttcaattattccaaggctactttttcagcgagccgcgcatcatcagcgggcatgacctatcgactcatttctattcttactatgaactgcttaacgaactgagtaaagagcagcctaacataaagcgtgtgacagagtacatagagcgggatttatcactgtcctatcaaattttaaaatttttaaactcatcccacagccgtttgagccagaaaattgaaagcattcaacaggccattatgctgctgggatttaatgaaatcaaacggtggatatatattctttcctttaaggatttaagcaggaaagggcattccagcaagcacgaaatcattaagatttctctgataagagcaaagctttgcgaactgctggcgagaaagacatcccggccgcagcctgcttcttatatgctgatcggaatgttttctctcatagacaccctcctgcatagagaaatagaggaaattgttcaagaattgcctttaaaagatgaagtcgggcaagcattattaggccatcaaaacgactactaccaaatgcttgagcttgtgaaattaattgaaagcaacaactgggacacttgctcagaattaggcaatcaactggacaaagaagaagcgtatgaatgttatttagaggctctggaatggtgtcataatcttatggacgcaaaatgattgcggtcctctgaccaccgcaaagcaagaatcattcggctttgcgttccgataaggctgatatagatgccgtcgggattaaagaccgtatccacttcatgccggacgcccatttgtttgatcaggcgccttatagtttgtttatcagactgttcggctgcggtcagaatgcggcgcgaaagctcccgcgagcccgcaatgcggctgagaacgagctgggcatccgcaaatatccctgcggcctgcttcgctgaacggataaaggtatcaatattgttggcaggagcgggcggacggcgtacctcatacggatacacgtaaaaccagggataacgatatctcatgggagcacctcgcaaaaaaggatgtttctatatgtatagatccctaattgccgaatatgacaaagcgaaaaggccacaactttagcgttgcggtctttttcggtgtttgtcggtcaggaaacgccaagaatcgcatattcaattttgaaaatacggtatgaaggactatagtcttgcttagtgaaaatgcgaaacccgttaaaatcaaggagattaagaatctttctcaatttcagcacatataaacgctctttcgcatagaaagatagtcccgttcttgttgtgattcctttgagtataaggacctattgagatttgcggtgtcacgcaggacttttttgcatacttttcggtgaaaaatgagccgaaagcagatacactattagtaacagatcaaatacctaggactcgttcaccatacacaattcattgatctttcaaaaaaaggagtgtggaaacgatggaaaagaaacttgaagaagtaaaacaattgttattccgactcgaacttgatattaaagaaacgacagattcattacgaaacattaacaaaagcattgatcaactcgataaatacaattatgcaatgaaaatttcgtgaaaaagacttggaaacaagtcttttttttcgttctaccgatacaataaatggataaagtattatatgattgttaaaaaacgaaaaacctgctgtcctttaaatgtcccatttagtaaaatggaatgggaggggggaagtcgttattgagcagatatgtttagattctgtccggatcaaggagaaaatgaaggagattgtggagcaaaacatatttaacgaggatttgtcacaacttctttactcatttattgattctaaagaaacattctcctttgctgaatccacaatcttacattatgttgtttttggaggggagaatttagatgttgcaacaaggcttggcgcgggaatagaaattcttattctttcatcagatattatggatgatcttgaagatgaagataatcaccatgcattatggatgaaaattaatcgctcggagtcgttaaatgcagcactttccttgtatacagtaggattaacgagtatttattcattaaataacaatcctctaatttttaaatatgttttaaaatacgtaaacgaggccatgcaaggtcaacatgacgatatcactaataaatctaaaacagaagatgaaagtttagaagtaattagattaaaatgtggaagtctgattgcactagcaaatgtagcaggtgttttattggctacaggagaatataatgaaacagttgaaagatattcctactataaagggattatagctcaaatttctggagattattatgttcttttatccggaaatcgcagtgatattgaaaaaaacaaacatacactgatttacttatatcttaagcgcctttttaatgatgcttcggaagatttattatacttaatttcacataaagacttatattataaatcgttacttgataaagagaaattccaagaaaaattaattaaagcgggagttactcaatacatttcggtattattggaaatatataaacagaaatgtatttctgctatagaacaattaaatttagataaagaaaaaaaagagctaataaaggaatgcttattaagttatacaaagggggatacaagatgcaagacctaattaactactttttaaattatcctgaggctttaaaaaaattgaaaaataaagaagcctgccttataggttttgatgtgcaagaaactgaaacaataattaaagcttataatgattattatctggctgatccaataacccgtcaatggggtgattaataggtggattaatattgaagaacttaataaaaaaattcacaatagctgtaattgttttgagtatcctttatataagctatacaacttatatcagtatgaatggaattattattgggactaagattcataaaaatgataaaagtcaatttatgatagaagaaatatcggaatcttcatatggacaatttgttggtctgagacagggagacatcatattaaaaattaataaagaaaaaccttcagacaaacatttgaaatggggatatttgagtcatattaacagtctggatattttgagaagtggaaaaaagattcatctcaaagattttgatttagttactctaaatagaccttatagtttttttctgttcgtacttcctttgtttttttattttttaagcataatatgtattttttatatacttaaagtaaataaaaaaaggagatcatttgctgcctatattcttattctattgttattagacatttcgatagcatatataagtgcaggcggaccatttagaggacatataatcaatcggtatattaacttgtttacttttatatcttctcctattctttatcttcaatttatacaaagataccttggagaaataggtaaaacttttttgaatagaatttcttttctttatatcataccaatatttaatcttggtattgagttttttcaagactatttacaagtagatattgattttttagcaactcttaatttggtttcttttgcaactttgactctattttctttttcagcgatatacttacatcttaataaatataaatatgctgagcattcgtttattcttaaattactaattttaacaaacactctttcatttgcgccttttttgatattttttgttcttccaataatatttacaggtaattatattttcccggcattagcttcggcgtcattactagtactaattccgttcgggttagtataccaatttgtagccaataagatgtttgatatagagtttatcttaggaagaatgagatactatgctctacttgccatgataccaactcttctaatagttggtgcattagttctgtttgatgtaatggacatccagatgaaccctgtgcgtcaaactgtatttttttcgttgtcatgttcgctgtcttttattttaaagaggtcatggattttaaatttcggttaaaacgtttctccgaaaaattcaactatcaggacagtatttttaaatatactcagctaatgaggggtgtaacttctcttcaacaagtttttaaagaactgaaaaatactatactggatgttttgcttgtaagcaaagcttatacctttgaggttactcctgatcacaaagtgatatttttagataagcatgaagttggaccggactggaatttttatcaagaggaatttgaaaacgtaacttcagaaattgggaaaattatagaagtcaatcaaggctttcttatgaaagttggtgaacgaggcggtagttcttatgttctgctttgtttatctaatattaacactccccggctaacacgtgatgaaatatcgtggctgaaaacactgtctttttatacaagtgtgtccatggaaaatgtcctgcatattgaggagctcatggaacatttgaaggacttaaaacaagagggaaccaaccccatctggctgaaaaagctaatgtttgcaatcgaagaaaaacagcgttcaggactcgcccgcgatctccacgattcggttcttcaggatttgatttccttaaaacgccagtgtgagctgtttttgggtgatttcaagaaggatgataatccgtgccgtgaagaggtgcaggacaagcttgtacagatgaatgagcagatgtctgatgtgatttcgatgacgagggagacgtgtcatgagctgcggccgcagcttctgtatgatcttggattggtgaaggcgctgtcgaagctggtggcgcagcagcaggagcgggttccgtttcatatccgtttaaataccgggagatttacggcttcccttgatctggattcgcagctgaatttgtaccggatcattcaagagtttctgtctaatgcggtcaagcactctcaggcgacggatgtgctgattatgctcatcagtattcaaaacaaaatcgttcttcattatgaggacgatggcgttgggtttgatcaagaaaaaaatactgagcattccatgagcatggggctttctggcattaaggagagagtcagggctttagatgggcgccttcggattgaaacaagtgaaggaaagggctttaaggctgatattgaaatcgaattgtaatggatttataacggaaacgacttggcacaggccaagtcttttttataaaatggaaaagagtgagtaaaagggaggaaaacatgaaaaagatactagtgattgatgaccatccggctgtcatggaaggcaccaagacaattttggaaacggattcgaatttgtctgttgattgtctcagtcctgaaccgagcgaacagtttatcaagcagcatgatttctcgtcatatgatctcattttaatggatctgaatctaggcggcgaggtcaatgggatggagctttctaaacagattttacaagagaatcctcattgtaaaattatcgtgtataccggttatgaggtcgaggattatttcgaggaagcgattcgtgcgggtctgcacggtgccatcagcaaaacggaatctaaagaaaagatcacccaatacatataccacgtactcaacggagaaattttagtcgattttgcttactttaaacagctgatgactcagcaaaaaacaaagccggctccttcctctcaaaaagaacaagatgtgctcacacctagagaatgcctgattcttcaagaagttgaaaagggatttacaaaccaagaaatcgcagatgcccttcatttaagcaagcggtccattgaatacagcttgacatcgattttcaataagctgaatgtcggttcacggacggaagcggttttgattgcgaaatcagacggtgtactttaaatgttggggggtgtagagatggatatgaagcacacattgcttgaagcgcttggtattgagattgttgaaaacacagcggaacgatgcgttgcggtcatgccggtggatcatcggacggtacagccgttcggatatttgcatggaggcgcttcagtggccctggcggaaaccgcggcgagcgcaggtgcacagaacctgattgatcatacaacgcaagcttgtgttggtttggagattaacgccaaccatttaaaatctgtaaaggaaggaacggtaaaggcgatagccgagcccgttcatataggcagaacgacgattgtctatcatattcacatatatgacgagcaagagaggctgatctgtatatccagatgcacgctggctgtcatcaagaaataaaaaaacagccggaactctgcctgtccggctgcttatttttataaataagaatcctcttttcgtttaatcacaaagtttctgattccgttatagtcatcttgcacacttctctcatcaagcttgacgccggagttatacgcagcacggcagatcaagtgcccgccgataggcgacgtaataaagataaagagaatcccaagcaggattttagcggagagctcccccgtcacaaaccacaaatagaagaagacaccgagcagaatcatattgacacctaatgttgagcctttagaagcagcatgagcgcgtgtaaacacatcgggaaggcgaagtacgccaaatgaagcaatgaggcatataagagcacccagcaaaatgaatacagccacaacgaccttagcggtttcgatcattttcgataatctctcctttctccaggaacttggaaaatgcgatcgttccgataaacgataaaatccccagcaacaaaataatatccaaaaacgcacttgttttcagcaaaatggagacaagcgccgtgattgcgatcagattgatgccgattgcatccagagccacgacccggtcaggcacagtcggacctttaatgacacgaatgacatacaaaaaggtagacactgccataatgccgagcgcgatttgcaggatcagcgtaaacatcaccggctcacctcctgtatggctttttcaaatgactcccgaatgtcaaaaatcgctttttccgcatcctcgatatccattgcatgaatataaagtattgttctgtcatctgaaatatccatcaccaaggttcccggcgttaatgtaatgagcagagaaagcatggtgatttcccagtccttcgtcagttcagttttaaaagcaaaaatacccggtctgatattcagttttggagataagactgatttcatcacactgacattggcaaggtacagttcctttataaaaatgaaacagagcttgataatagaaatcaatttccatagataaaactggcgagtgaaaaagcgccggaagaaaaagagagagagcattcccagaatatagcctgtaatgaatcctgcggcgcttggactgttgcttaagaacatccagcaaaaagcgagaaacacatttaataaaatttgaaatgccatgcgatctactccttcagaacagcttcgatatatttttccggattcagcagcgtctcggccgcttgatcaacgtaaggcgacacccattctgtacccaatccgaagagaagggacagcaagagaaaaatagctgccggataaagaagtcctttagctgttcgatgatttggttttggcgtttctttttcttcgccccaaaacgcatgtataaagatcctcagcacagagtacagtacaagcagactcgaaagcagaatcagcatggatatcgtaaattcaccttctgcgaagccgccctctgcaattttaaatttgccgacaaatccgctcagtggcggaatgcctgcaagagaaatagcggaaatgaaaaacatccatccaagaacaggatagcgtttgatcagcccgcccattttatgcaggctcgcggttccagtcaatgcgatcagcgtacctgccagcatgaacaaagcgcccttaatcagcatatcgtgaatcagatagtagatcgcgccctgaatggatgcgggggtgtgtactgccacaccgaacaaaatcacgccgacagcggtaataatgttatagatcacaattttcatgacattcgaataagcgagtgaaccgatcacaccaaaaatcacagtcagcgccgccagccaaatcatcaactgatgggtaaaggctgtatcgtgaataaaaatcaatgtgaaaaccctcgtaatcgcatataacccgacttttgtcagcaaagcgccgaacaacgcggagattgccgccggtggcgcgtaataagagcctggaagccaaaagtagagggggaagattccgcccttcatgccaaataccaaaagcagcaggacaccaatcacagtgatcagcccggtttgtcctgattcgctgattttcacgctaagatccgccatgtttaacgtaccggttacagcgtataaaaagccgacccctatgacaaacagggcagacgatacaatattaaacacaatatatttaagggattcccgcagctgaatttttgtgccgcctaatacaatcagcatataggaagcaataagcagaagctcaaaaaatacgtacatattaaataaatcgcctgttaaaaacgctccgctgacgccggcaagcaagaactgaacgccggagtagtaaaaggagcgctcccgtttttcaccgacagaacggaaggaataaagcccaaccaataaaccgatgatcgctgttgtgagaacgagaaggctggcgaattggtctgcggcaagcacaatgccgtacggcgctttccatccgcctaggctgagtgtctggatgccttttgtgaagacagtctgtacaagtatgccgctaatcacaatcccgatggccgatgccgccgtgctgaagattctcatgagcataagattcttcgtcatgaaaatcagaagaatagccgacaaaagcgggatcaggattggcaaaataacaaaattattcatgttgatcatttcccctcatttgatccatatcgtccgatttcaattcctgataagcgcgaaaggccatgacgaggatgaatgacgtaacgccaaaagaaatgacaattgcggtcaaaatcagggcttgcggaagcggatcgacaaatgatttggcatgctcgctcaaaatcggagcggcgcctttctttaatcctcccatagtcaaaagcattaaatgaacgccatggcttaacagtgctgttccgataatgacgcgaagcaggcttttagacagcagcaaatacgtagcagccataaaaataataccggctaatacagccattaagatttccattattcttcctctccaatcgtttgaataatggtcatcgttatgcctacgacaacaagataaacgcctaaatcaaatatcgtcgctgtggcgagctccgttttcccaaggatcggcagctgaaagtatccgaatgtgtgggttaaaaaaggagccccgaagacaaaggagccaacgcctgttaatacagcgagcagaaggccggctcccgcgacataaatgaaattgacaggcaaaagggaacgcacggtttttaaatcatatgccaagagcaagagaacgatggaagaggacgtgatcagtccgccgacaaagcctcctccgggcgcgttatgccctgataaaaataaatagaaagagaaaagcaaaatgataaaggatacaagctttgtcgcggtttgaagaatcaagtcatttgttttttgttcattcaccgcttttcccctcctcttttacttttgttttaatcatgctgtaaatgccgagagcggctatcgttaataccgtaatttcaaacattgtatcaaatcccctgaaatcaacgagaatgacattgacgacattatcccctccgccgagatcgtggctgtgtttgacaaagaaggacgcaatgctgtcttttgtccgctggcttgaggatgcgatgccgagcagtgtaacgataacaccgacgcctaaagaaatgataaaattcgtcatccggaacgttctcgtttttgttttcagcctcagtttcggcaaatggtagaagcaaagcagaaacagtgccacagaaatcgtttcaatgacgagctgagtcaatgccaagtccggcgctctgaaaatgacaaaaaacaatgcaagcgtataaccgacaacaccgagtgcaatgatcgccgtcagtcttgacctagcaaaaacagtcgccactgtggcgctgatcatgacaagcgtcaaaatgatttcgtatacaccgattttagccatgccttccgttttaaatgaaaatccgcctttaatggcaaaagctccgcctatcagaatgatgaaaccagcgaagatatacagcaaataatctcttaaaaacccggtcatatattgttttgtgacccggtaagagcctttctccatcatagtcaaaagcttatcgtataaccggttgagtgtgagtttcgaaggaaacagtttatagattcctttccacttattcagcgacaaataaccaattgttccgatcacaacaatacccgcagtcatgagcaattccgttgtaaccccatgccactgtgaaatgtgaacgtggaatttctcatggccgtcaagcagtgtcggatagattgagttcatcgcaggctctatcaggctgtacgacaatatattcgggaaaaagaagagactgacagccaaagcgacaagaatgaccggtggaacgagcataccgacaggcgcttcgtgagcctgtttttcaagctgttcaggctggtaatttcctctgaatgttttaaacagcaatttcatgctgtagataaacgtaaatacacttccgatccaggcgaaaagagggaacagaacgccccatgtctgcacgttgaacaggtcaaaatgtgtcacgcgaagcatgcttgtgaaaaacatttctttactcaaaaatccgttaaacggcggtaggccggccattgaaaatgtcccgattaaggaaatggtaaaagtaatcggcataatcgccatcaggccgcctagcttccggatatcccgtgtgcctgtttcgtgatcgataatcccgactgccataaacaagcttcctttaaaggttgcgtggttgatcaaatggaaaatggcagccatagcggcaactgtataatattctgtatgtccgtaatgaagggccgcagcactgactccgagcatggagatgatcatgccgagctggctgacggttgaaaacgccaaaatcgattttaaatcagtttgtttcacggcatggaatgaaccccaaaccatcgtaaagaggccgacgagggacacgatccaaaaccactgagctgaaaaggcgaaaataggactgaatctcgcaatcacataaatgccggcttttaccatagtagctgaatggagataagcgctgacaggcgtcggagcttccatcgcgtcagggagccagatgtaaaaaggaaattgcgccgatttcgtaaaagcccctaataaaatgagaatcatagccgggataaacaattcgtggccggcaattaattgaacctggtgaaccatctctcgaatactgaaggaatccgttatcaaataaaggagaataaatccgccgagcatgcacagcccgccgctgaccgtaatcaaaagtgatttggctgcgccatagcgcgacttttcccgcttataccaatagccgatcagcaaaaaggatgaaaggcttgtaagctcccagaacatgtagagaaccatgacattgtctactagaacgacgccgagcatggcgcccatgaacatcaataagtagacataaaagggcccaagctgttctttttctttcgataaataaaaaatgctgtaaagagtgaccaaagagccaatgcctgtgatcagtaaagcgaataataacccgaggccgtctatataaacggtaaagttaatgccgagtgacggaatccactctaataccgatcgaagtgtttctccagattgcgtcatcctgatcattgggagaaagtatataaacagcaagacgggcaggatcaacacaaaccagcccgtatgcactctttttgcgtattttgccaagaagggaatgataaaagcaaataaaaaaggcgataaaatagcaagatgtaagagctgcaaagataagacctccttttctcgttctcaattgaaaaatgcgctatgtataaaatatacggtcaaacgacctagtccaaattatatcgcacttttctgcaagctgccacgcttcgaactgctgtaatggatttttatgagttcttttgacctcaaaataagtctaacaaaaaagaggttatttgtatatttaaaatcaatcctgatcaagctgaaggaaaggagctggtcatgtgaaaacaaaagtcgtgatgtgctcaggtttattctgctcagtatttgcaggggcattcatgttgaatcaatatgacgggcgcagcggtgtggcggcttgtgatgagtgggagctgtatttactggagcaccacctgtcagccagaatgagtgagacggaatcaaaggatctgccgtttggtccccgagagtatattcggattgtgaataaataaaaaaagagttccgcataaaacggaactctttctgtttatgaagtgaaaaaacgaagcagcactgtcgcgcaaataactgtgcctgcaccgccgagacgggttgaaatttgggcaaacggcataaggcccattcttcctgatgccgataaaatggcaacatcacccgttccgccgagaccgctgtggcagcaggtaacgattgcggattcaaccggatacatgttcatcagcttgcctacgaaatatccagaaccaatcatcgcgataacaactgaaatacagatgatgacaaacggtatagaaatcacagacgctacgtcatccaacggaataaagaggatgccgagaccgaccatcagcggccatgtaaagcttgaagaaataaacttataaagctggtaagcgccttcttccatttttttcggaagaatatttgcatacttgacagccgcagctgaaataatcattaagatcgcgcccgggatgaagatgaatttctccaataacccgccaaaaataaagaatgtacacgcgagcagaactcctgctcccattagtttaaaatcaatttttgcttcggcttctttttgattgaaaatctcatttgcttttttagattttacgagacgtccgttcccatttagatctggacgcttgtcgccaagctttttcattaaggctgcacatatgatagcaaaaacgtttcctataattgcggctggcaccagctgagacacaaatacatcggcggatgagcccagtatttgtgaataggcgattgaaagcggcaaaatcccttcacctattcccccggcaataatcgggacaacaacaaagaaaaaggaatcataggcactatagccaaaaataaatccgacaaggatgccggctgcaacggccgcgatcgttcctgcaaccagtggaacgaacattctgataaacccctgtattaaaacaattctgttcataccgaggatacttcccacaacaaggcaagcgatatagaaataaaggaagttagacgttttcatcaagttggttacagcgtctaaagatgttgaattcagtacattgtaaaagactaaaaatgaaggaacaaacaaagataaaatagcagggccgccaatatccttcaatatcggtatgcgttggcctatgtctccgagaaacacaccaagaatcataatgatggcaaacccgccaagcatatttgccggcagctcattgtaatatgctgcaagaataataataacagctaatactgtgtataatggcaaaggaatcacaccgatttcccaagaccaaattttttgaaacaggtttttctcctgtgagtctttttgctcaggtgaaattgtccccgtttttggaattgctcccatgtcatacacccccatgtattgtttgttacagtctacaagaaagcgttaacacttcatatttttttaagttaaaaaactaataaacaattaaattaagggggtcttttggattagaaaaaaatccctgagaatcgtcttcccaggggagaatgtttatctttttcctttaatataaggcacgccattggcttttggcgcatctgcccgcccgataaagccggttaaagcgagaatcgttaagatataaggagccatcagcatatacacatttggtatgtctttaaaaagagggagcagcgatccaatgatgcttaagctttgggcgaatccgaaaaacagggcggcccccagtgctccgatcggatgccattttccgaatacaagcgctgccagggcgataaaaccttgcccggagatggtagagtgcgtgaaatcaagcgcaattgtggaggcatatacgccgccgccgagaccgccgaacaatccgctgatcatcacgccgatgtagcgcattttatatacgttgattcccatcgtatcggccgccatcggatgctcgccgacagaacggatacgaaggccgaacggcgttttgaacaagataaaccaggaaataaaggcaagtgctattgcaagaatagacgtataatagacatccgaaaagaagatctttcccaagacgggaatatcgcccaaaccggggattttcgtcttataaaaaggctctggaattttgtctgtctgcgctttgccgtagatcagtttgacgataaataaagttgccccaagcgccagcatgttaatggcgacaccgctgactgtctggtcggcgcgaaacgaaatcgccgctgccgcgtgaatcagtgaaaacagggcgcctgctgccatggcggcaaggagcgaaagccaaggtgcggcggcacctaattcctgaccaaaaaataaattaaataacacgctggtgaacgccccgataatcatgaggccttctaggccgatattcaccacacctgatctctcggaaaacacgccgccgagagcagttaaaataagcggggccgcatagacgagtgtggcagggacaatgatagataaaatctgcacaatgtccacttagttcgccccctttttcttcaatttgcccatgacgaaacgaatcgcatagcttgaagccacaaatagaataataatggcaatcacaatatcaacgacctctgatggaacgcctgattcaatcggcatatttaatgcgccgattttcagcccgccaagcaggcatgctgccagtacaacgcctacggctgtgtttcccccgagaagagcgacagcgataccgtcaaagcctacgccggtaaatgcgcctttcactgctgcgtattcgaatgtccctaggccctccatggctccggcaagacctgcaaaagcgccggagataagcatggaggtcatgatattcttccgcacgctcatgccggcatactgggaagcgtgctggttaaacccgaccgcccggagctcaaatccttttgtagatttgttgatgataaaccacatgataactgctgcgagaagggcaacgatgattcccaaatgcagccgtgagtaatcggtgatctgttcaagaaaaggagagcggagggaggcggattcgtgaattttccccgtcttgtcctgatgatctgtcaagacgtttgaaatgatgtaattggtcatgtgcagcgcgatataattcatcataatggtgacaatgacttcatgaacgtaaaatcgcgctttcaaaatgccgggaataaacccccataatcctcctgcagctgccgctgtaatcaatgcgagcggcaagtgaatatatgccggtccgtcaaacgccgtaccgacccaaaccgctgctgtccagccgacgagcagctgtccctcgacgccgatattaaagagtccggttcggaatgcaaaggcgacagccaatccggataaaatataaggcgtaatttgccggattgtttctccgacataatagatttctccgaatatcccattccacaaagccgaatatccgctagccacactgtagccgctcacaagcataatcaacgcgccggccgcaagaccaagtatgattgcgatgagcggcacgagtaaatgagagagtcgtttaaccatttgctttccccgcttccttttgcgtgcttcctgccatcaagagaccaagctcctgttcagtggtttcctgcggattaacgctggcgataatgcgtccttcaaaaataacggcgattctgtcactgagattcataatttcttcaagctcaaacgagaggagaagaacggctttcccggcatcacgctgctcaatgagctttttatggacaaattcaatcgctccgacatcaaggccgcgagtcggctgggcggcaattaataaatcaggatttcggtctatttcccgcccgataatcgctttttgctggtttccgcctgacaatgcccgagcgtgtgtatattcatccggcgttctgacatcgtactcagtgatcaggctgcgtgcttttttgtacatttcgcctttatgtaaaacgcccaatgctgaatacggctttttgtaatagctttgcagcaggatattctctccgattggaaaatcaaggacgagaccgtgtttatggcgatcctgaggaatatgcccgatcccggattcagtgatttttcttggcgtcaggttttggatctgttttccgtttaaggtgattgttcctgaatctgttttgcggagtcctgtcaccgcttcgatcagctcagattgcccgtttccgtcgacgcctgctatgccgactatttctcccgctttgacagaaagagacaaatctctgactgtctctattccgcgggtatcctttacagttatgccgtcaatcgcaagcacttccgctcccggctgagcagctctcttttcagttttgaacgatacctcacggccgaccattagactggcgagttcgtcttggtttgtatcacggacatcaagggttttgatgccttttcctttacggataaccgtaacgcggtcacaaatctccataatctctttcagcttatgggtgattaagatgatggacttcccttctttgaccaggttcttcataatttgcatcagttccttaatttcatgaggcgtcaaaacagccgtcggttcatcaaaaatcagaatgtcggcaccgcggtagagggtttttaatatttctgcgcgctgctgcataccgactgatatgtcagctgcttttgcttcaggatggatctgcaggccgtatcgatcggaaatgtcctgcacctcttggccagcacgcttccggtcaattctgccaaacttctttggctccttcccgagaataatattttcagcaactgtaaaggtgtcaacaagcataaagtgctggtgcaccattccaattccaaggtcattcgctttgttcgggctgttgatgtgcaccttctcgccgcgcacccgaatttcaccccgctccggctgatacagcccgaaaaggacattcatcaatgttgatttccccgctccgttttcaccgagcaacgcgtgtatttcgccttttttgacttgaagattgatattgtcattggcgacgatacctggaaacgccttgcggatattgagcatttcaatgacatattccattgattgaccgctcctttatttcaaaataaaagaaaaacaagggataagggctcgacctccttatccctgcgattcttattcagctttgaaggttttcagctctttctcagttgccgggatttccaatccgtcgatgatttttttcttccatttatcgaccgctttgatcacatcatccgatagattttgtttagatggagaaatgccgactccgtcttgatcaagcccgtaggtaagtgtttcgccgcccgggaactttccgtcactcgcttttttcgttacatcttcaacgactgtatctacttttttcaccatggaagtgagggtgacgttatcatctgttccttctacctggccttctgcgtattggtctttatcgacaccgatgacccagacatcgcgttttggatcttcttttttcaggtttttcgcttcagtaaagacgcctgtgccagtggcgcccgcagagtgataaataacatctacgcctgatttatacatgctttcggcggttgctttaccgacatcggctttatcgaaaccccctgcgtatttcacttctacaacggctttagggttaactgcttgcacgccggcacggaagccgacctcgaattttttgatcaactctgattccatgccgcctacaaagccgatttttcctgatttgcttgatagggctgcggccactccgacgagaaatgagccttcctgctctttaaacgtaatacttgcgacgttgtctttatcgacaacagcatctataatcgcaaagtttgtatttttacgctggtcagcaatttcgctgattgaatcctccattaagtagccgacgccgtaaattaagtcaaaattctcacgcgccaatttatttaagttcgttgtatagtctgcatcagatttggattgaagatagtcgtaaccgtttttgccttttttcagcccattctctttcccaaaggcttggatgccttcccaggctgattggttgaaggatttgtcatccactccgcctacgtcagtaaccatcgccacactgaatttgtttttgccttcgcctgagccgctgcttttttcgctgtttccgcatgctcctaatatggtgcctgctgcgatcacaagtgacatcgccaatccgatttttcgtttattcaagatataaccccccagaaaaatttggttcaaagctgatccggccagtcatgtgatgggctgtcctgaacaatttcttagaatcgataaaattttctgataataacaaatggaatgcgctgagacagttctattcttccctgaataagcgtggtgtgagtatttccttcgaaaggcggggaagagaaggatgcggaaggcgttccgggcggaaaaccgtgacatcgttttctgaagtaagacttatgacttagtttttcgggatcaactaaccaatcataatttatcatttaactaataagaaataaatagaatttcgcataattttttaaaaattatctatttttagaattatttgcttaaaaatgtgaaagccctttgttattcttgtataacttatcaacaatagaatcaagcatcttggcaagagatatgacagaaaaacgcactgctcaaagcaagcagtgcgttttcttatagatattgctttattccgttaatgttactgttgttgacgttgtactgaaacacaggtcttccgatcgttccgtacgccatttctacattcagaacctgtatatcttcaagaaactttaagtattttcgtatggatacttgagagatttctgtgtgctttgccaagtcttctgtcgtaaaagattcattttcaaatgactggatactggaccagatcagcttcagcgtgctttttgtcaggcctttaggaagctgcactttttctgttgcttctttcttttgaaaaagctcggcgtccagttctttttggctcatgttgcgatgggttgaatacaccttttgttttcgtctgtaatcagacagagccgtttggaatcgttcaaattcaaacggtttgattaaataatcaacagctccgtaccgaagtgttttcttgatcacgtcaagctcgctggccgctgagatgacaatcacgtcaaccgcttcattttgggctctcaattccgtcagcagttccagcccgttttttcccggcatataaatatcaagcaaaatgaggtcaatatggtgctcccctaaaatatgcagagcgctttgaaaggaagaagcgatgcctttcagctgaaagccatctatttggcttaagtatcgtttatttaattcacccaccatggggtcatcttcaactattagtacattaatcatgattttcctccttcggttcgtacgggatgcgaatactgaatgtcgttccttcattcttttcgcttgtgaggatcatttggccttttaaattttcgatgctttgctgtgtgaaataaaggccgaatccccggtttttgccctttgttgaatagccttgttcaaatactttggcttggtcttcttcagacatgcctgctccagtatcggtaatttcaatatcaagtatgctgttatggaagcgcatggacatggtgatttgttttttcggcatatcggcaacggcatctaagccattgttgatgagatttccgatgattgtaataagttcatggatgacagaagggtctgccgcgttcgggatgacaccgttgcattcaatatcaagatttgcgccctgctcacgtataaagctttgctttccaagcagaaaaccggccagtacggagcttttgacatcatttataatttcacttgtttctgatttttgctgtatggctatatctttaatataatctccaagatcatcatactctttcagctggacgagacctaatatcacatgcagtttgttcataaattcatgagactgcgctctcagtgcgtttgcatacattttaacaccggaaagctgttcagctaaatgttttacctcggtcttgtcgcggaatgttgcaatcgctccgacagtttgtcctttcagctggataggaacttcattaaacacaagctccagcccgttaatgcggacgtctctgtcttgaagaggtttttttgtctcaatgacctttttcaagcggcttttcggcaagatgtcatctacatcctgatcaatgggatttgtgttgatgcccattttgacgaataggcgttttgcttccgcgttggcaagtttaattttgccatgttcatcgacagcgagtattccttccttcgtcgattccagcatcgcgctccgttcttcaagcagagtcgcaatttcataaggttcaagtccgtacatgatatttttcactgtacgggcgacgataacggctccgatcacaccgacgaagatgctgacgcaaataataaagtaaagcggccgtaagctatggctgatcacttcatcaatttcatttacggtgatgccgaccgcgactgcaccgacctgttttccattctccgcgtagacagggacgaacgctctctgcgatttcccgagcgtgccagaggctgtgctgatatggacatgcccttttaatacctcggactcatcaccgcctctgaatttttttccgattttgctcgggtcaggatgagttttgcggataccgttcatatccatgacgacaacaaattccgtgccggtaattttctgaacccgctttgtgtagctctgcagttccttttgtttttttccgctttctaaagcagcggctgtcatcggcgcttcagctaccatttcagcagtctgcagcgcagtggccttttcctgatctctaattcgtttggtggtttgggcaccgactgtaaaaaacgtaatgagcaatgcgattaatacaacgatacaaacaaatatggtgagtctggtttgcagttttaatgtttttttcatataaaacttccttacgttttatgattcctgcgtactactttactctcaaaatgctgctttgtgaagatttgggcccgtaattcgtaaaaaggagaaaaaatggaataatttatcttgtcaatgtgttttaagtcctccataataaatgaggtagattatagaaagggacttttttatatgaaaaatacttatttgacaggatattttccgctgattgcgatcctgctttttagttcgtccttatccatctcaacttcactttatgcgttgaagatgctgtcttcatttggaatgtatgatggaatgctcgattatttttcagagaaaggaatcaggcttgcgttatttgctgcctttgcacttttatattttatggttctgtccgctctgaaattaattgcaaataccgtgaccgagctgtcattgctgttttttgctaatgatccggaagggaacaacctgaaaaaactcagaatgggttccatgatttatttgggcggcgggattttatcctttgtgctcttgcaaaatgtcatttggattgtgatctggtttgcggtcgtcacgctcgcttactttgtgtttaccgtataccggatttattcgacgctttctctcatgtcattagttggattcattctattggaactgctgttttggtttacctttgttatcggtattctgttcatatttatcaagctttataatagcataatggctagcttacctgtgtaagctagccatttcagcgtttggtggtcagatttgcgcttcgtgctctgtacgcaatgaaacggcggctagattctcaggtttccgccgtttcacaacttcaaaagttttcaatcacgctgaatagatgacaaaatcctaaaacgaagccgttttaggattttgtcaacaatctgtgatggctagcttcctagccattttttatttacggtaaaaatctttttttaatggaaggggaggggagcatacattcattttttttgccaaaccacttatagcggtttttggcaatgaaagaatagaccatatctctgacaggcttcggcactgcgaaaaaaaggacgaagagccgccatgggcctcgcagatgcctgaaaaccttaatggctgcagttgactttgtgtacacttggccgtcttcaataaagacaaagctgtcaaaccgatcagtcggaagcccgctttttttcagcaggctctgtcctgtttccgactgcagcgatgtgaaagaaatcaatccgtccggatcacgtttaatgataaactgcacggcgccattgcataaattgcagacaccgtcaaacagcaaaacgcgatttggaatttgttctgaagtcactccatatcccctccgatcctttaataagccgcttgcagcgttcctttccagatggaaagctgagggctgatgctgtgaagatattcaacgctggtcggtgtatcctttccgacccagacacccattgtatacgtatcagtcaggccgacaaaccacatatcgtgataatcatttgatgttccggttttaccgccgatgtaaggcgcattgaaatatgcttttttccctgttccgcttttcacaacggaagacatcagttttttcagctgcatgttcgtgcggacgctgaatatttgagtcgctttatcattccatttataaagtgtttttcctttaaggtctgtcacctttgtaatcgcatggctcggcgtatagcttccgctgtttccgaatgtcgtataagcctttgtcatctcaagaggcgtcatgccgtttgtaaatccgccaagcgccgccggaagaagatagtcactgtcgacaagtttggcaaaatgatacggctcaatataactgaatgccttttggatgccgacgcggtcgagcattctaatagccggggtattatatgaatttttaaacgccgtatcaagcgtcactgtgccgtaagtgcggttattgtagttttgcggacagtagtctttgctgcaaaacttgctggcatcaatggtgctgcttgttgtcgcgccggtctgttcaatataagggccgtaatcaagaagcggcttaatggatgaacccggctgcctgtacgcctggtaggcgcggttaaagtcatatttttgatagtttttcccgccggatagagcaatgatttgatgcgtctggtgattaatcacagccgctccgccctgtacgtccgcatacgggagcttggaattcatttgtgccacaacttgattttgcatgtacggatcaagtgcagtataaattttcactccgtctttcatcagcgtgctgactcttgcggacagctcgttctcgatcttttctttttgttttcctgatgctttttgaaggcgtttatcaaagccttctgattcagacaccagctgagtgaattcatcattgacgtaggaaacgtagtcaggatatttgtcttctcttttttcaacatccagtttgattttttgttttacggcttttttcagctctttgtccgtaatgaccccggcatcttttagccctttaagtaaacgttcttgacggcttttcgtgtagtcaaaatgcttgagaggatcatataatgtagggttattaggtatagcacagataaaagccatttctcccactgtgagagatttcagcggtttgctgaaatagaattgagctgctgaaccgacgccgtaaacaccgttgttgaaataaatggtatttaagtaagcttcaagaatttcatttttcgtatattttttctccagctgataggaatacgcgagctctgtcagcttgcggctgaaggagcgttcgtggctcaaatacaagtttcttgaaagctgctgtgtgatggtgctggcaccctggtcaattttcttgtcttttacgttagaagcagtagcccgcaccattcccataaagtcaaagcctttatgctcgtaaaaatggcggtcctcagatgttaagaaaatctgtttgacttcctcgggaatcttgttaaatggaacgagcacacggttttcgtggtcgctgacgatttccgagacaagggagccgtccctgtcatacatgtagctgttctgaacaaggctgatatctttcagatcaatatttttatcaagcacctgatccagggacttcatttgttttacttcttttccggaagcgataactgtaaatgcaaacaatgggattatgcaaaggagcaaaatccatccgattatttttcgtaacatggtcactctcttttctcctaaattctagccatatcgtaccattcttttgagattacgagaaggttaaatttagaagattccttagttttttctcggaatcagcttgctttggcataagaatctttccgaagtttctgcatgatccaaagcatgcaggcgccggcgaaaaagagaaacgccgtgacgtaaaaggtggccgaaatggtaaaatggctcgatatgattccgccgagcagaggcccgagcacgtttcctaaaaagcgaaagctgacattgtagccgagaacttcaccttgaatgctgccgggagcctgaacgcggatcgctgccgtaatgcatggcagcaaaccgcccatcgccattccgaataaaaatctgaaaacaaggagcacgctgagtgaggacgcgagcgcctgcggaataaaaaagaaagaggcggcgagcaaaagtccgattaaaatgcggcggtggccgtagcggtcgcccagatcaccccattttctagccagcagcaaacttccgagccccgttgctgaaaatgccatgccggagaaaaaggcaagattgacaggtccgtgcagctcatttacatataaagcgagcaggggctggatactgaaattgcctgtttgaatcagcatggttaacagcatcatgacccacagcgccggatggtgaaaaatataggagagcacttcttttctcgagtaagacgtacgtttggctgttttctctgcaagatgcttttctttgacaccaaataacacgagaagaacagacgagaaaatcacaaaggatgtgataaaaaaggtatacgtaaagccgaaacgatcagcaagcatgcctcccaaaagcgggccgaacaagcttccggacacttgccccatttgcagcgtgccgagtgttttgccagctgagctcttcggagtctgtgccgaaatcatcgcaagagatgtcgggatgaatccggttacaagacccattgccatacgcagaaaaaacaattggtacaccgatgtaacaaagcccatgaagaaaatgctgagggcaatgcctgttccggttgccataaggattttcttgtatccgcgtttgtctccgaaccgtccccaaaacggggataccaaaaacgccatgagaaatgtaatgccgaacacatagccgctccacctttgcacaaagccgtttgaaaaagagctgagcgtctcaatgtataaggagagaaaaggaacgatcatcgttgtgctagcggagacaaaaaagttcgccagccacacaatgacaaagtttttcttacggatagaaataacatcaccttcttattatttcgggttccttactaattataaagaaacgattcacaatttaaaagaaacgaagcggctgggaaaattcattatttttagaaaatgaagaaatgtcgagaaggggaattgatatactataaagatagcattttctgatcggaggaaaggcaggtgtaaaaggtgacgacaaacagcttactcattattgatttcgaatttacaatgcctgatggaaagtacagtcctcaaaacttcttcccggaaatcattgaagccggaattgtaaagtcgattgatgatgaagtggttgagacgttttctagctatgttagaccgaaaaagttcccgaagcttacgaaacgctgcaaatcatttttaaaaataacccaaaaacaggtagacgaaggaatgagattcgaggatttcatccgtaaactaaacgagctggatcctgagaaaaacagcacaattattacgtggggaaacatggatatgaaagtgctgaagcaaaactgtatgtttaaccatatccctttcccgtttaagggagaaatgagagatttatcgcttgaatacaaaaacttttttggagaccggacattgacgggtttatggaaagctgccgaagagtatggagattccggaaccggcacccatcataaagcgcttgatgatgctctcacagcatataaactttttaagcttgttgagcaggataagcagtatctcgaaaagccaaaaccgcccacaatcggcgagagaatcgatttaaccgaactgttgaagcgcgcgacgtaaaaaacccaatcttttgtcagactgggttatggccggttaaaatattctttttctaaaatgtccagattatgaagggagcgctttgcccactccgaaccatcctcattcaatttggctctcatctgtgctgtcgcctcccgcagagattcggtataatccggcacttcaccgtcataaggcttcaccatatggtgggggatattggtctgttcaccatatgcgagcgcttttctctcatgaaaaaatggcacatccgcctgttttggatgatgaaggtctccctgagcgggatgggtaagaaccgctttcactttcactaaataatgctgcggcctgcaagccgtgatttctcctatgtatacacctgttttgtaaaatcctttaacgatagagcctgtctcaaacgtgctcatctgtcatcacctcgcatttattctattaaagttccaatcgatttgctagtgaggaagatcagcgggaagcttaatggtcaccgtagtgcctttttggaagctgctgttaaatgaaatggtcccgtgatgatgttcaataatggaaaaggttacggtgaggccgagtcccgttccgttcgtttttaaggaataataaggttcgccgagtttttgcatttgatggtctgtcatcccgaccccattgtctgtgatgttaatcatgatcgtatggccgtttcttttggctgatatgtggatcatccccttcccgtgaggaaccgcttcaatactgtttttcatcaggttgatgacagcctgcttcagctttgttgcgtctccgtatatcaaaaggtccggttctgtttcagcctcgacggttactgacttgtaattggcgtacgacaccataagggagcttgtctctttgataagggcagataggtcaaaaacctctttttcgtataattgctgtttggccatatcgagatagtttgtgataatgccttgcgcccggtcaagctctgacagtacaagctttttgtaatccgcactcgacttgttttgtagggtttcgtcattaaaaagcagctggacaaacccgcggacaactgtcagcggattcctgacctcatgggcgacgctcgctgccagttcactcacaatcgtcattttttcagaatggataagctgtgaacgcagggcgatattttcggcgatgctttcgataatatagatgcttaatagaagaacactggagcggaaaagccctgagactgccgcctcgtaaacgaaaattcctgatttttgaaaatttaaaatattcaaggcggaaagaatccagcttgaggcgaaaaataggaaaatctccacgcagctgatcaataaagacagcagcagttttttcgctttggacatgaatggccattttttctgaaataagattgggataatgataagaaaaggcagcaaagtgaaaacaaacattgcggaaggttcgtaaaaaagcagttcaaaacataggacagatgcggcgactgtaagtccggaagcggtactaatgtaaaataaacaaatgataacgggaatcatctgaaggccgtattgtatgtagtccatttcatgaatcgggaaaataatgcataaaacggaggcgccgcaggcgaagagcgtgaccaaaccgctgtttatttttggcacaagaatcgcaggttttccaagccaaaacacttggtaaagaagaataggaaacaaaataaagcagatgtgcagaagatagtcttttagaatttccattcgtgtgaaatcctttcgtataaaatatgaatctattataacactaaatattagaagtaaaatataaaattcctttattaagaacgcctttacaaatgaagacgtaaaggcgtttacagctatatttacgataatgcggctttgatgcggcgcaggccgtcctgcagggttgcaagagagcatccggcgttcaggcgcataaatccttctccgccaggcccgtatttcgtcccgggctctaaaataacttttcctttttttagcattctttgctgaagctctgcatcggacaagccgtaagcgctgaagtcgagccaaatcaagtatgatgcatccggcttcatcattttgacctttggcagctcggtgctcaaaaaggcttccgcttcgttcatgtttttctcaatgtaagtgatcaattcatcaagccacggtccgccttttgaatacgcggcttcgattgcagtgacggcaaacgcgttcagtccgcctaaaccatttcgctgaaggcttgcggaaaacttggcgcgcttcaggcgatccggaataatgatcgctgaagcctgcaatccggcgatattaaatgttttgcttggagcagcacatgtcacggaaatatcagcgaaatcgtcagagagcgaagcgaacggcgtgtgtttatgtccgtacagcattaaatcggaatggatttcatccgatacaactgtgacgccatgctcaaggcacaattcgcctagcttcagtaaatcttcccggctccatgaacgcccagaagggttatgaggattgcataaaataaacaatgtaacgcttgggtcactaagctttgtctccaaatcttcaaaatcgattgcatatgcgccgtctttttctagcagcggattatgtaaaatgtgccggccgtttttctccaccatatggtaaaaaggcgtataaactggaggctgaacaactacttgatcgcccggctccgtaaaagcttgtaccgccatgctcaaagctgttacaacgccggggctgaatgtgatgctttccggatttaccttccagccgtgcctgttttgcatccatccgcacacagcatccttcgttttttgatctggagttgtataaccaaaaataccgtggtcaagacgctcttttaacgcttcagttatcgcttccggggcgcgaaaatccatatctgccacccacatcgggagggcgtctgtcacgccaaataattcgcctgttttatcccatttgaccgattgggtgccaaggcgttcttctcgtttatcaaagttcattctgttaccccctcatgtatgtttattcttctaagcttcactatgataagatagaactgcaaattttattataagcggtgatgaatatggaagaaagtcatgcggtcagggaaatgattaagatcattgccaaatgggacccgtttaaatatggagaagagttttacgaaacggaggctgttgatgtcgtgcaggcagtctatgatgaaaacgatcccgacttgctggcgaaaagcattcagcaaatatttgaaacttcttttgaacaaacgctgccgatcgccagctgccgggaagtggctggccagcttttattcattaaaaacagcagctcctgcacgccttaaaaaaaccggttcagcaccggtttttttgttatttgataaaatcagcaatgtgttcagaaataagttcaggccgttcttcaggcaccagatgtccggtctggccaagtgagtacagcacggaattaggcaaatctgcgtgcagccgtttaccgatctccattgggacaattcgatcctcctcgccccaaatcaatagagcaggcttgttcattttcttcaattgctcgggttctaaatctccttctctgtggcggataaaccttgtcatggctttgaaaatctgctcgtcctgaaacggtctgccatagccgtcaatcatctcctcatcaatcagcgatttgtcatgcaccacatttaataaatttttcatcacgccttctttcgagagccagcgtttgatgtaaagatgaaaatacgggatatgggtcccgaaaataatcgtcgggtgtgaacgttttaaataccctgaactgcaaagcagcacaacctttgaaaaaagctcaggtttttggagagcagcagacagcgatatctgcccgcccatagaatgcccgacaagcacagcctgtttcacttgcaagtgctccaaaatcccaatgacaagcttagcaaggttttgataggtatagataaacgttcttgatttttcagattggccgaaaggaggcaaatcaagcgcgatgatgtcgtacttgtcccgaaggagaggaattacttttctgaagctgaatgcagatgataaaaaaccgtgtacgcagaccagcgtttgcctgccgggattttgataatgttcgtagtatacattgactccatcgaccgtaaaccgccttattggtgaaaccgcctccattctgtgtcactccctttttttgatggttgtattatgccctgaaattgtcaattctagcggaagtttctcctcgttttttcttagcattcgtcaaaaaacgtgatataatgtcatgagatttcttgacattgcaaaggtgtgaatcaaatgaaattgacagaaaaagaaacagaaatattagaaattttagacgaaaacagccgcgccgatttagaaacaatcgcaaagatggcgggcatccctgtaaatgaagtgaaaacaattattgacaaactggagaaagaaaaggttattatcgattattccgctatgattgactggcgaaaagtcgacggacatgagggcgttacggccatgattgacgtcaaagtaacgccgaagcggggcgtcggttttgatgaagtggcggaacggatttaccgattccaagaggttgaatcagtttacctgatgtcaggcgtatacgatttgtctgtcgtgattcgcggcaattcgatgtctgacgtagcgcgttttgtttcggataaactctcaacgcttgattcagttgtatctacgacaacccattttatcctgaaaaaatacaagcatgacggcaaagtgtttgaaacaggagacgacgacaaaagaatcgtggtgtcaccgtaaatgacttcgtatttatcagactatgtacaacaaataaaaccatccggcatccgcaaattctttgatttggcggcaacgatggaaggcgtcatttctttaggcgtcggcgagcctgattttgttaccgcatggaatgtccgcgaagcaagcattctctctcttgaacaaggatatacgtcatacacggccaatgcgggtttatactcattgcgggaggaaatcagccgttatttgagcaacaggtttgaccttagctactcgccagataatgagctgattgtgacagtgggggcaagtcaggctttggatattgcgatccgcgccattgtgaatccaggtgaggaagtcatcattcctgagccgtgttttgttgcgtacgatgcgcttgtttctttggcaggcggtatcccggttcacgttcatacaacggcagacaaaggatttaaagcaacggctgctgattttgaagcggcagtcactgaaaaaacaaaggccattctcatctgctcaccatcgaatccgacaggttcggtttattcgaaggaagagctgaatgagattgctgagtttgccaaaaaacatgatgtcatcgtcttagccgacgagatctacgcggagctgacatatgatgaggaatttacaagtatagcggcattaccgggaatgaaggaacggacggtagtcatctcaggcttttcaaaagcatttgcaatgacgggctggaggctcggttttgccgcggcaccatccttgcttcgggatgccatgcttaaaattcatcagtatgcgatgatgtgcgcgcccgcaatggcgcagtttgccgcccttgaaggcctgaagaacggcatggaagacgtagaaaaaatgaaaaaaagctatcgaagaagacggaatctgtttgtagaatcgctcaatgaaatcggtctcagctgtcatcatccgggcggcgctttctatgcttttccatctatcaaaagcatgggaatgagttcagaacagtttgccgaggagctactgacgcaggaaaaagtggcagttgttcctggaagtgtgtttggtccgagcggtgagggatatatccgttgttcatacgcaacctcgattgaacagcttcaagaagcgttagtcagaatgaaacgcttcctgcacaaaacaacataaaaaaagatacgaaccttttgttcgcatccaataaaaggggggaatactagaaagcctttggtattttcagtttaccccctttttgctgtgcataaacctgattttttataaaaaagttttctttgcggaaataagacatgtgtgatataattttaaattgcgtataaacagatatttaatttaacttaggagttgttatgaatggcagcaaaatttgaagtgggcagtgtttacactggtaaagttacaggattacaagcgtatggtgcgtttgttgcattagatgaagaaactcaaggtttagtacacatttctgaagtgactcacggtttcgtaaaagatatcaacgagcacctttcagttggcgacgaagtacaagtaaaagtacttgctgttgatgaagaaaaaggcaaaatcagcctttcaattcgtgcgacacaagctgcgcctgagaaaaaagaaagcaaaccaagaaaacctaaagctgctcaagtaagcgaagaagcttctacaccacaaggtttcaacacattaaaagataagcttgaagagtggatcgaaatgtccaaccgcaaagaccttatcaaaaaataagcatgaaaaaagcaccggacaggaatgttcggtgcttttgatttcatgcaaaatcctatttcagcgtgattgatatcctatcgcatttcaggatttgctgcttcttcacgtgatctttcctcgtttggcttaaatagcagaccgaggttgattaagccggcgattccgacaagtccgtaaatgattcgggaaagagctgacccttggccgccgaagatagccgctactaagtcaaattggaaaaatccgatcagtccccagttaatggcgccaatgatggttaatacaagacaaattctttgaatggtactcatgttttgcaacctcctccatgaattattaaaacagttatagattgtgacatattggagaatctatacatgcattctccatatgagggaagctggcctgccctcgcttatatcagcttctttcccagcaccttgcaaaataaaaccatctggtatgctgatcggtgagagctgattgctttacatgtggtgaggacattctgcataataaaaaatctaaggaggagatgtcatgcaaaactttacatactggaatccgaccaaattaattttcgggcgcggcgaagtggaaagacttccggaggaactcaaaccttacggaaaaaacgtattgcttgtgtacggaggcggcagcattaaacgcagcggcctgtatgatcaagtgattgaacagctgaataaagccggagcgaccgtgcatgaattagcaggtgtggaaccgaatcctcgtgtgtcgactgttaataaaggtgttgccatctgtaaagaacaaaacattgatttcttgctggctgtcggaggcggaagcgtaatcgactgtacaaaagcgattgccgcaggagcgaagtatgatggtgatgcgtgggatatcgttacgaaaaagcatcagccaaaagatgctttgccattcggaacggtattgactctcgctgcaactggttcagaaatgaactcaggatctgttattacaaactgggaaacaaaagaaaaatacggctggggcagcccgctcgtattccctaaattctcgattcttgatccggtgaatacattcaccgtacctaaaaaccacacgatctacgggatggttgacatgatgagccacgtattcgaacaatacttccatcatgtatcaaacacgccgtatcaggaccgcatgtgtgaatcacttttgcgtacagtcattgaaacagcgcctaagctgatcaatgatctcgaaaattacgaattgcgtgagacgatcctgtacacaggaacaatcgcattaaacggcatgctttctatgggggcaagaggggattgggctactcataatattgaacatgcagtatcagccgtttatgatattccgcatgccggcggactggcgattctgttcccgaattggatgagacacacattgtctgaaaaccctgcccgcatgaaacagcttgcagttcgcgtgtttgatgttgaagaagcaggtaaaacggatgaagaaattgcccttgaaggtatcgataagctgtccgcattctggacaagtcttggcgctccgaaccgtcttgctgattatgatattaatgatgagcagcttgacacaatcgctgacaaggcaatggctaacggtacattcggccaatttaaatcactcaacaaagaagatgtgctgtcaattttgaaagcatcactataaaaaaaggggaaatagccgtttggctgcttccctttttcttttttgtcaacttatgttacaatggaaaatctgttttttaccagcatcatttggaggttttactatggaaaatttcacttattataatccgacaaagctgatttttggaaaaggtcagcttgaacaattaagaaaagaattcaaacgatacggcaagaatgtactgcttgtttacgggggcggcagcattaaacgcaacggcctttatgatcaagtcacaggcattttaaaagaagagggcgctgttgttcatgagctgtcaggtgtagagccaaacccgcgtcttgcgacagtggaaaaaggcataggactttgcagagagcatgacattgattttctgcttgctgtcggcggaggcagtgtgattgactgtacaaaggcaatcgcagctggcgtcaaatatgacggtgacgcttgggatattttcagcaaaaaagtaacagcggaggatgcgctgccgtttggcactgttttaactcttgctgcaacagggtctgaaatgaaccctgattccgtgattacaaactgggaaacaaacgagaaatttgtatggggcagcaatgtcactcatccgcgtttctctattttagaccctgaaaatacgttcaccgttccagaaaatcaaacagtatacggcatggttgacatgatgagccacgtattcgaacaatacttccataatgttgaaaacacgccgcttcaggatagaatgtgctttgctgttttgcagacggtcatcgaaacagctcctaagcttcttgaagatctggaaaactacgaacttcgtgaaacgattttgtatgctggtactattgctttaaacggcacgctccaaatgggatacttcggtgactgggcttctcatacaatggaacacgctgtttcagctgtatatgatattccgcacgcgggcggtttggcaatactgttcccaaattggatgagatacacgcttgatacaaatgtaggccgttttaaaaaccttatgctcaacatgtttgacattgatactgaaggcaaaacagataaagaaattgcgcttgaaggaatcgataaactgtctgcgttctggacaagcctcggtgcaccttctcgtcttgctgattacaatattggagaagaaaagcttgagctgattgctgatatcgcagccaaggaaatggaacacggcggcttcggcaacttccaaaaactgaacaaagatgacgtgcttgccatccttcgcgcgtctctataaacccaaagggcggaatccagtcattccgccctttcttcttgacttgatttcacagataagttcatataaagtgaaagatgaaaacattataccgttatggagggacaagcaatgacgcatgtacgctttgactactcaaaagcgttgactttcttcaacgaacatgaacttacatacctgcgggactttgtaaaaacagcacaccataatatccatgagaaaacaggcgcgggcagcgattttctaggctgggtggacctccctgaacattatgataaagaagaattcgcgcgcatcaaaaaaagcgcggaaaaaatcaaatctgactctgatgtcttgcttgttgtcggcatcggcggttcttatcttggagcgcgggcagcgattgaagcgctgaatcacgcgttttataacactttgccaaaagcaaaacgcggcaatccgcaagtcatttttatcgggaacaacatcagttcatcttatatgagagacgtcatggatcttcttgaagatgttgacttctctattaatgtgatttctaaatcaggtacgacaactgaacctgcaatcgctttccgtattttccgcaagcttcttgaagagaaatacggtaaagaagaagcgaaagcgcggatttatgcaacaactgataaagagcgcggcgcattaaaaacgctttctaacgaagaaggctttgaatcattcgtaattcctgacgatgtcggcggccgttattcagttttaacagctgtaggtctcttgccgattgctgtcagcggcgtcaacattgacgacatgatgaaaggcgccctggatgcgagcaaagattttgcaacatctgaactggaagataacccagcataccaatatgcggttgttcgcaatgtcctttataataagggcaaaacaattgaaatgctcatcaactacgaaccggcgcttcaatactttgcggaatggtggaagcagctgttcggagaaagcgaagggaaagatgagaagggcatttatccttcttcagcgaactattcaacagaccttcattctttaggccagtatgtacaagaaggccgcagagatttattcgaaacggtcctgaacgtagagaagcctaaacatgaactgacaattgaggaagcggataacgatcttgacggcttgaactatttagccggtaaaactgttgatttcgttaacaaaaaagcattccaaggtacaatgcttgcccatacagacggaaatgttccgaacttaatcgttaacattcctgagctgaatgcatatacttttggataccttgtatatttcttcgaaaaagcctgcgcgatgagcggttacctccttggcgtcaatccgtttgaccagcctggtgtagaagcgtataaagtcaatatgtttgcgttactcggcaaacctggctttgaagagaaaaaagcagagcttgaaaaacgtctggaagattaatgtgagaaagctgactggcatttgccggtcggctttttataaaatcagaaaggtgctgatgttcatgaaacaattggttaaacatctcatcattgccggtttttctgcagctattttaagtttccttatctcctttgatgccgtgtatacagggttttcttcaagctttggcggcacgctgtcacattttttcatccactcctttcttctcattggtttgccgcttgccctttttaccgatgcggtacatcggattttgcatttaaaacgaacccatactcttttcactaaattaggactctatgcaacggttgtttatgtgtcttgggattcagctgtatggcttgcagcggcaatggctgtttacttcttaattgaatgcgctttctttcctgttggccgcgcgaaagaaacaacgatttccatgtaggcgcctctgaatgaagtcttgttcggcgggacaggataagtgaaaaaaggggcattctgatgataccaataccttccgcgatagatgggcagtcttttctgcttcaagaactggaacaagtgatgaagccgctcggttatgtgataaacggcggctgggaatacgatcatggctactttgattataaaattgatgatagagacggctatttatttttaagaattcccgtcaatgcggtacagggcagtctcgatgaacgaggggcggccgtccggatcggaacgccatttatgctgagacaggtgtttcaggcggatgttgacgatcacgccgagggagggcctttccaatcactgtttaatcaattttccgaaccggaaaggcgggacgcggaaattgatccggcatttttggatatcggcgcctctctcgtgaaagaattggaggatgttctgttacactagatggcaaggaattgatctgtttcgagcaccttgtatgtaagaggaggggaaagcatcggcccctcctttttttgtatgcctataattgttgtgttgtgatcaaggaaatagagaacacaggttttgtaagccgctccctttagttcgtcaggaacagcaagaagctccacatgctgatcaagtgtcagcttgattccgttctgctgtttagacggccgtaacttgacttggtaatgctgcagcatcgcccggctgataaattctgaagttccgatgatttggtttgcgcctgcccgttccgcattggtgacaaaacggtcagttaaaatctcgacgatgcagtaagcaaggggattaagacctttaacagataaaagagtcagcactgacagcatatcagcatcagtttcacttttatactgatcggcagtaatcatcactgattccgcttcagtaatattggcccgtttcagtgtcccatcatcggcagcgtgcccgcgtatgaaatgaacgttttcaataagcgggccttctgttaaggattcatcgattagtacgactgttttggaaggggcggcaagctgaaggtccttcaaaagccggtttgttttttcattccacccgatcagaatgatgtggtcccggcctttgtaagcaacttttccttcaatgtagcgatgctgtctgctgaatgcggccgctgataacgtagcgaaatacgctgtgacaaagcttgctccgctcaaaatcagcagtattccggctgcctgtcccagcggagtgtgcggcacatagtctccataaccgactgtagaaaccgtaacgacagcccaccaaataccttcgaataccgaagtgaactgcttaggctcaagtatataaatgatttggccgaacaaaagaatcagacataaaataataaccccgattcggataaataacggccacctgagccatgaaataaatatccgatttgatttcattctttttctccttcttcagatactgagatggataaaatctgtttaataattgtatttaatttctcatttagcttttcctggccgtacatatctcgggcctgcttcattaactcggctgtatcatcatcaagctgaataagcggttcatcaatttccgattcattatacagctggataaacgcgtccagtccttcattcattcggtcgattgctgtgctcagctgttccttttcctcactcgtcactttcatagcttccatcacacccgtgcttttttctaacagtatgtcccacttccggtgatgtttttcaaaaaatgtacaaaacatataaaaccggatttctccataaactaaaacaaaaaggatgaaaaagatgacgatctttcaaagaacgatcgtggttttaatcggtacgcagctggcggcatccgcggtgattttgtttattttcgatttgaattcatataatcacttttccggaagcttctcctggcttcattttctgaaagaactggccggcagtttcgccttttatttgttttcagcaggcctgttctttttgctgattggattgtgtgctccaagccggaagaaaaagcgcatttctgtacacgagaaagaaaactcattaaaataatcgtaatagagaaatgatcatgaacaaaggatgatgaaaaaatgctgtttatatttttaacaatagccgcattgggattgtcgttttgggcacaatttaaagtaaagagcaactttgaaaaatattcaaaagtggaagcctcaagcggacgtacaggggcagaaacggcaagacggattttagatataaacggtctttacgacgtgccggtcgaaccggtaagaggcactttaacagaccattacgacccgacaagacgggtggtgcgtttatctgagccggtctattacggccgctcaatttccgccatatccgtagcttcccatgaagtcggacatgccttgcagcatcaggagtcatatggtgcgcttgtgctgagacataaaatcttcccagtcgtgaattttgcatccggtgtagctcctttgcttttcttaggaggcatgcttctcggcagcctgaatttgatcgggcttggcatcatactgttttcagcggctgtctttttccagctgattacattgcctgtcgaattcaatgcaagttcacgtgcgaagcagattattgtgtcagaaggattcatccgaaacaatgaagaaaatggggtaaataaagtgctgagtgctgctgccttaacgtatgtggccgccgccctggtttccctgtttgaactacttcgttttgtgatgattttcttaaacggtcgtgatgagaattaacgttaaggaggtggccccttaccatttatggtaagggctttttttgcttattttacaattgatcgccatttttgttttgattggcattacggctgttttcgttgcagcggaatttgcgatcgtcaaaatcagaggttcaaaaatcaatcagctcatcgaaagcggtgacagccgagcactagccgcacataaaatcatctccaatcttgacgagtatttatcagcctgccagctcgggattacgattacagccctcggccttgggtggcttggtgaacctacatttgaacgttttcttcatcccttatttacaatgacaggcataccggaaccgtttaaccacattgtcacatttgtagttgcatttatcatcgtcacttttttgcatgtggtgatgggggagcttgccccgaaaacggtttctattcaaaaagctgaagctgtaagcttatggattgcaaagccgctgatctggttttataaaatcacgtacccgtttattaaagcattaaacggctctgcaagttttcttgtgaaattgtttggctttcattcggtaaaggagcatcaggttgtcatcagcgaagaggaactaaggctgatcctttctgaaagctatgaaaagggagaaatcaatcagtctgaattccgctatgtaaataagatttttgaatttgacaaccgggtagcgagagagattatgattccgcggacagaaattgcggttatctctctggagcagtcgcttgaagaggcaattcatcacatcattaatgaacggtatacacgctaccctgtcatcaaagatgacaaggatcatattttagggatcatcaacagcaaagatatgtttaaagcttattttctcggccagccgataaagctgaatcaaatcatgaggcccgttatcagagtcattgaaagcattcctgttcagcagcttttaatccgcatgcagaaggagcggattcacatggcgattcttgtcgatgaatacgggggaacggcggggcttgtcactgtagaggatattatcgaggaaatcgtcggggaaatccgcgatgagtatgatcaggatgaaacaccgcacatcctgaaaaagggcgagcaccattatgtgatggatggaaaagcgctaatagacgaagtgaatgaccttctcgacattgcgattgaaaatgaagaaattgatacgattgcaggctggcttctaacgcaaaaaatggagctgaaagcaggggatgtgatacacgcggagggctgtgaatttaaaatcctcgacgccgaagatcaccacatccgttttgtagaaataaaaaaaactgatttttgataaaaaacagccggggaacaaacggctgttttttgtgtcatcaagtcatttcttaaaaagcaatgctgtaaagacctttttctacataggatatataagaacggtacactgggaaggagtggctgtatgaaaaaggcttggtggaaggaagccgtagtttaccaaatttacccccgcagttttaaagattcaaatggcgacggaatcggggatattcaaggaatcagaaccaagctttcttacataaaagagctgggcgctgacgtcatatggatttgcccgctgtatgattcaccgaatgccgataatggctatgatatcagggattatcaaaacatattaagcgagtttggcacgatggaagattttgatgagctgcttggtgacattcatgatctggatatgaagctgattatggatctcgttgtgaaccacacaagcgacgaacatccatggttcatagaatcccgttcatccatacactcggaaaagcgcgactggtatatttggaaagacggcaaaaacggaaaaacgcccaacaattgggaaagcattttcggcgggccggcttgggagtatgatcaaaagacaagccagtattatctgcacctttttgataaaaaacagcctgatttgaattgggaaaatgaaaaggtgaggaatgccgtttatgacatgatcaattggtggcttgataaaggaattgacggatttcgggtggatgccattacgcatattaagaaaaaagaagggtttcctgacatgccgaatccaaagggactggactatgtcccttcctttccttatcatatgaatgctgacggcattatggatttgttaacagagctgaaggaaaacacattttcccgctatccgattatgacagttggtgaagcaaacggcgtcgctgcaaaagaagcagctgattgggctggagaaaaaaacggcatattcagcatgatttttcaatttgagcatctcggcctgtgggatgtagagatcaatgaaagtattgatatcgttgcatttaaacgaattttaactgactggcaggacagtctggaagggatcggctggaatgctttgtttatggagaatcacgaccagccccgttcagtttctgtgtggggagacgacggagtgtacctgaaagaaagtgcaaaagcgctttccgctgtttattttctcatgaaaggcacaccgtttatttatcagggacaggaactcgggatgacgaacgtggcttttccatctattgaggactatgatgatgtcgcattgaaacgcctgtatgaaacaaaaacagcgaaaggcacatcacacgaggatgtgatgaagattgtctggaaaaagggaagagacaattcgcgaacgccgatgcaatggaatgctggtccatacgccggattttctgaggccaaaccgtggatcggaatcaatgagaattacaaatggctgaatgccgaggcgcaaaaaaacgataaaacatccgtttaccatttttacaaaagcttgatcaagctgcgccaaacatatgatgtttttattaacgggacatacgagctcattttaccggaagatcagcaaatctttgcatatcttcggaaaaacgagagccatactgcactgattgcggccaatctgacaggaacaccggcgttgttcaggcactctggattgccattgtcatcagatgcactcgtcttgtcaaatattgaaacagagccgcacaagcatatgacatcagtactcttaaagccgtatgaagcaagaatatatctatggtgctaaactccagccttagactggagtttttttgttttatcgggtttatgagagcggtttaacaggaaaaaaaagaacacagaacgaattaagcgatgagagcggacaaacgaaaggagaaacaaatgctgaaaacactgcaaatcaaaacaaccaaacgagatgaaatgatagatatcacccgggaggtggaagcgtttcttcaagaaacaggtataacgagcggcgcagcgctgatttactgtccgcatacgactgcgggcattacaattaatgaaaatgccgatccggacgtcaaaaaagatatgctcagaaggtttgatgaggtatatccgtgggaacatgagctggaccgccatatggagggcaatacagctgcacacatgaagtcgagtacggtcggagcttcacagcatgtcattgtggaaaacggccggcttattcttggaacgtggcagggcatttatttctgcgaatttgacgggcctcgcacccggacatgctatatcaaaatgatgggataataggctgttttttatgacaaaagcatgatcgctgaacaagcgccgatagccggagggcttgtcacacccgcccacgctgcggctttatcgaatgaaggcgtgcttggcattcgtccatatgcgaaataaaaagcgagggaaagagacacgcgcctcaccctttgttttccggaaagcctgcatgagggatagttaatcaatggatgtaaacgtaccgagctttgccgaacgtaacttgataaactgaggtgacagatatgaacattcttcaatattcttataaaaaaagagggaaaattgagtttgtatttgaaggctggcctcactcaaaagttacaatggttcctatcaaaggctactattttgtccgctttatcaaatggagcagccaggatccaatcgtgacaagaaatgaccttgaaaaaatggagtgggctgcgaaccaatattttggcacagcccccttctatcgaaaacgaaaggcatttgaaaccccatcgtccggaaaataggcgatggggctttttagcggacgatgcggaaaagagacggaacatccagtctggtcgcctgagacagaaggtaggctgactgtaaggctccttttttcctaaaagaattcagcttatcaataatttgctttccgtttaagattccaagaccatgggcaaaatatttatcttcccccagtagtatcacattttcgcctctccattgcgccttttgcggatcaaattcaggattcttaaaatacaaacaatctccaaggaaaaagtggtgtcctgtttccgtatatatcggcaatttctcataatgccagtcatataaaataattctgtcaaagctggcattgaatttatcttctccgattgtatcgattaaggccaagtaataaatgataacgattgcggttgcgcattcaaacgcataaaacgggccgttctctgcaatgtcccgaatcgcttttgaaggcggcattctgtatttcagctccaaggcgccctccggtgaaaccctccaatacgttgtattcccgtatgtttttaaaaaagtggcaaacttcgccccgcttttgtgcagcgtctttgccgctgctacaatattcatccgcagtttaagctcaaacatcagttcagcaattgaatgataatcaaactgaacaggcgtctcaatcatctcttttaagagcggattcagatcttgatcaatctgccaattttcaatatcctggggacggagcaattgtcctgatacaataatcatgtttagccccccttgttttttataagatatgcaaagagcttgggcaatgaaagttaaaaaggcagaagacagccaaaaagaacttcttccattttttattttaaaacttttttaagcagccgatatatactgtatcaaacctgaaggagcaagtgacatgaagacttttatcaattggctgaagaaaccgtctatttcaaagaaattaatcgtctcatttattgcgattctcattatccctattcttatattagaatttagctcttaccgaagcgccagcggaaagctggatcaggaaattatgggaaatgcgaaaaacagtgtcgatacatttaatacaactgttacaaatgatctgggagaaaaagcgaaagcagtcacctttttcagtgaatctcttaaaagatccgcattcaaagggaaatcaaatcaagaagagatcaaagctaaattttcacaatatgtatctattaatcaaggagtagccagaatttatgggggcgcagataacggcacttatgtacaagcgccaaaagaaaaattgccggaaggatacgacccgagacaacggccttggtaccaggatgcgatgaaggccggcggtgaaattgtcgtgacagatccttacgtggctgcgagtgacggaagcatggtcattaccattgcacaggagctgaaggacggatctggcgttgtcgccatggatattaccattgataaattgttagaacaaatgaaacaaatcaaggtcggaaaagaaggttatgctttcattgcaacaaaaaacaaaacctatgtcgcccacaagaaccataaggctggagaaaagctttcaggcgactgggtagccaaaatgtatgcgaatgacagcggtgaactccagtatactcttaataacgaagataaaaagatgacctatactacaaacgaactgactggttggaaaatagccggcacaatgtatatggatgaaattaaggatgcctcaaagtctgtgctgacaacaggaatgattgtgctgattgcttccattgtggcaggcggaattttaattctgtttatcgttcgttcgattacaaaaccgttaaaacgtcttgttcaatcatcgaaaacgatcagcaggggggatctgaccgaaacgatcgaaatccattcaaaggatgagcttggagagcttggggaaagcttcaatgaaatgggacaatctctccgctctctgatcagcgctattcaggactcggtgaacaatgtggccgcatcttccgaacagcttaccgcatctgccgggcagacgagtaaagccaccgagcatattacgatggcgattgagcagttctcaaacggaaacgaggagcaaagcgaaaaggttgaatccagctctcatcagctgaacttaatgaatgaaggactccagcaagtctcacaaacatcgtcagatattacaaaggcatctatccaatcaacggaaatcgccggaacgggtgagaagtttgtgcagcagacagtcggacaaatgaactcgattaatcaatctgttcagcaggctgaagctgttgtcaaaggcttagaaggaaaatcaaaagacatcacaagcattttgagagtcatcaacggaatcgctgaccaaacaaatctgcttgcactaaatgcagccattgaagcggcgcgtgccggagagtcaggacgcggcttctctgtcgtagcggaggaggtgcgcaagctggctgtccaatcagccgattcagcgaaagaaatcgaaaagctgatccaagaaatcgtcgcagaaatcgacacctctcttcacatgtttaaagaggtcaatcaggaagtacagtccggacttgttgtcacagacaatacaaaagaaagcttccagagcattttcagcatgacaaacgaaatcgcgggcaagctgcagacgatgaattccaccgtcgagcagctgtcagaccgttcacagcatgtttcagcagcagtcagcggcattgcagacgtgtcgaaagaaagctcggcaagcatccaggacattgccgcatcagctgaagaacagcttgcttccatggaagaaatcagttcctcagcgacgactcttgcgcagatggcagaagagcttcgcgatctgacgaaacaatttaaaatcgagtaaaaaccgaaaaacagcgctatcaaagcgctgtttttttatatggtaaacaataataaagtcctagtttaacaggtgaatttagaactatttttcattttttcctccattttcaatgtaatttaaaggaagatccgccgatataatttgtaaattattgaaagaaggttcaaaaggaaatgaaaaaaacactcaccactattcgcagatcatcaattgcaaggagacttattatttctttcctgctgatcttaattgttccgataaccgccctttcggttagcgcttatcaatcagcagttgcctcacttgatgtacagatgacgcaaagcgcaaaggaaaatgttcagatattagatcacatcattgatgataaaatcagcactactgaaaaaagcctcgcatatttcagcgattgggctacagcagaaaaatttcaggataaaaagaaaacagagctgaaacaggaatttaaacaatttatccaaatgaatgataatgtcgctgcggtattttcaagcggcaaagacggggacttcacacgttatccgtacgctgacatgccaagcgactttaatgctttggaacgagattggtacaaagaagcaatggccaataaaggcaaaacaattgtcactgagccttatgaatcgatttcatcaggaaaaatggtcgtcaccatcgcccgtcaaacggtggatgggtcaggcgttgtcgccattgatatgaaaattgatgacttagtcactaccgcgaaaggaatcaatatcggaaaagaaggctatgcttttattttgagccaaaacaagaaagtcatcgcctactccggagaaaaagcgggaacagagctaaaaggggactgggttgataagctctacaaggataaaagcggggactttgaatatacgtacaaaggcaaaaagaaaaaaatggcatttgcaacaagccaaacaacaggctggaaaatcagcggcacgatgtatgcaaacgagattcacgatgctgcaagcagggttctgatcatggcttcaatcgttctggcgattgccatcggagctggaatgacggcgatttattttgtgattcgatccatcacaaagccattgagacgcattgtcgcatccgctgaaaaaattagtgaaggcgatctaaccgaaacgattgaaatcaattcaaaagatgaactcggcgttctgagtgagagcttcaatcatatggcacactcgcttcgctcgctcattcacgggatcaaagactcagtagaacacgttgcctcctcgtctgaagagctgactgcatcggcagaccagacaagcagagccactgagcacattacgatggctatcgagcaattttcaaacggcagtgaaagccaaagcgagaaaatagaaacgacaaccgaacaaattaatgaaatgaatgacggattggcagagctggcgcgggctgcagcagtgattacagaaacatccgcagattcaaccgaagtgtcaagcaaaggggagacactcgtccagaaaacagccggccaaatgaacacaattgaccattccgtaaaagcagcggaacaagtggtgaaagggctggagatcaaatcaaaggatatcacgaatattttgcgtgtcatcaacggcattgcggatcaaaccaatcttttggctttaaatgccgccattgaagctgccagagcgggtgaatacggccggggcttctcagtcgtcgctgaggaagtgagaaagctcgcggtacagtcggctgactcagcaaaagaaattgaatcgctgatcagtgaaatagtaaaagaaattcacacatcactgaacgtgcttcagtccgtaaacaaagaagttgaaacagggcttgtcatgacggatgaaactaaacagagcttcaaacatatatcgcaaatgaccaatcaaattgcttccgagctgcaaaacatgaatgcgacggttgaggagctgtcagcgggagctcaagaaatttccgcagcttcaaatgatatcactgccatttctaaggaaagctcggatggcatccaagatatcgccgcttcagctgaggaacagctggcatccatggaggagattagttcatctgcactgacgcttgaaagaatgtctgaagaactccgtgatctgacaaaacaatttaaagtagacaaataataggtctaaaatactatttatttatgggaaattagttacttttgttaaatttcttcttttttgctgtatatatttacccatttccagccgatatgaagggtagcataaaaaaggagaaatgaatgatgaaaaaaatactccaactcataaaacaaagatcaattacacggaagcttctcgtttcctttctgtcgatcctcatcataccggttgtcatattggcgatctttgcgtatcaatcggctagcagctcactcgacagacagatgatggggagcgcattggaaaatgtacagcaattaaacgaaatcattaacaccagcatcggcgaaaaagaaaacagtgctgattatttcagcgaatggctgacaaaagagaaatacaatgcaaaaagcaatgcaagcattgcagagaaattctcacaatatatcagcattaacaaggatgtagaatccatttatacaagtgacacaaaagggcactttacccgctatccggatcttccgatgccaagcggctataatccggttgaacgcgactggtacaaaaaagcggttgcaaataaagggaaagtcgtgatcacagacccttataaaaccgcgtcgacaaatacgatggttgtgacaatcgcccagcagacaaaagatggttcaggcgttatcgcaatcaacatgacgattgaaaatctgctgaaaacaaccaaaaaagtcaacatcggcacacaaggctacgcatttatcatgacgaaggacaaaaaagttgtcgcacaccctaatgaacaatcaggaactgaattaaaaggcgactggctcgataagatgttgagtgctgataaaggcgattttcaatacaccatggatggcgataagaaaaaaatggcctttgacacaaacaagttgacgggatggaagatcggcggcaccatgtatttggatgaaatccatgaggcagcccagcctgtccttcaccttgctttaattgtcttggccgcagctattatcatagggattatcgtcatgacattgatcattcggtcgattacaacaccgctgaaacagcttgtcggttcctctaagcggatcagcgagggagatttgacggaaaccattgatatccgttcaaaagatgaattgggcgagctcggcaaaagctttaacaatatggcgtcgtcacttcgttctctcatacacgccatccaggattcggtagacaatgttgccgcttcctctgaggagctgactgcatcagctgcgcaaacgagcaaggcaacagagcacattacattggcgattgaacaattttctaacggcaatgaaaaacaaaacgaaaacattgaaacggcagcagagcacatttatcaaatgaatgacgggttgacgaatatggctcaagcttctgaagtgatcactgattcatctgttcaatcgacagaaattgcaagtgaaggcggcaagcttgttcatcaaaccgtcggccaaatgaatgtcattgacaagtccgttaaagaagcggagcaagtcgtacgcggattggaaacgaaatcgaaagatattacaaacattttgcgtgtgatcaacggcatcgcagaccagacgaacctgcttgccttaaacgcagcaattgaagcagcgcgcgcaggcgagtacggccgcggcttctccgttgtagcggaagaagtaagaaaactggcagtacagtcagcagattcagcaaaagagattgaaggattaatcatcgaaattgtgaaggaaatcaatacatcactcggcatgttccaatctgtcaatcaagaggtgcagacaggacttgacatcacagataaaacagaaatgagcttcaaacgcatttctgaaatgacgaaccaaatcgccggcgaactgcaaaatatgagtgcgacggttcagcagctttctgccagctccgaagaagtttcgggagcgtctgagcacattgcatcgatttcaaaagaaagctcagcgcatatacaagatatcgcggcgtcagctgaagagcagctagcttccatggaagaaatcagctcgtctgcagagaccctttcctctatggcggaagagcttcgggatatgaccaaacgatttaaaattgaataataagccttaacacccaagcttgttgcgcttgggtgttttttttagtttttttattaaaccttttatcctagtttgacgatattagatttatcttaaaggaggagtcaacgagaatgggaaaattcatacaatggatcaaacagccatcgatcagcaaaccgctaatcgctgcgtttctggcagtgcttattttgccggttggggttttagcatatttcagttatcaatcagcttggaacgcgttagacagagagctcataagcagtgcgaagggaaatgttgaagaactaaacagtacgctgcaaaataaattagaagataaagtaaaagcaatagattattatagtgagacagtcgataaagacatattgttaggcaaaaacaaaacattactgaaagagaaatttaagcagtacacgacacttaacgacgatgtaggcgcaatctatgctgcctcagaagataagaagctttataaatatccggatagcggtgttccgaaaggtttcgatccgacaggacgtgactggtacaaacaggcggttgcggaaaaaggacaagctgttttctcagaaccgtataccgatgaagcgacaggagatatcgttgtcacaatttcaaaacaattaaaagacggttcaggggttatagcgctagatttaaacctggatgaagtgcttactgcatcaaaaagaatcaaaatcggaaaagaaggctttgcatttattacgacaggcaacaaaaaatatatcgcccatccgaccattaagccggggacaaccggttccggcgattggacaaaccaagtatattccaaaaaagaaggctcatttgaatatacattcgaaggcaaagaaaagaaaatggcctttacgacaaataaactgactggctggaaaatcgcgggcacatattttgtcagtgaattgcaagatgcttcaagcccggtgctgaacactgcggttatcattctatgcgtgtcaatagtaatcggcggcatactcatactctatattatccgtgccatcaccaagccgttaagaaaacttgtctcaacgtctgcaaaaatcagcagcggagatctcacagaagtcattgacattcactcgaaaaacgagtttggccagcttggcgaaagctttaatgaaatgtctgcatcattgcgttctgtaataggcgttattcaaacgtctgtagaaaacgtcgcttcatcttctgaggagctgacagcaagcgcagcccaaacaagcaaggcaactgaacatattacacttgccatcgaacagttctcagatggcaacgaggcacaaagcgagaaactggaaacaagctcaaatcatctttctcaaatgaacgaggggatttcaaaagtggctcaagcctcttcaaccattacgaaatcatcgattcagtcctctgaggcagcgggcagcggagaaaagctggtggagcatacagtcggccagatgaaaacaattgaccaatccgttcaaaaagcggaagcggttgtgaagggccttgaaacaaaatcgcaagacatcacaagcatcttgaatgtgattaacggcattgctgatcaaaccaacctgcttgcattaaatgctgcgattgaggcggcaagagcgggagaatacggaagaggtttctcagtagttgcggaagaggttagaaaacttgctgtacaatcagcagactccgccaaggaaattgaaggattaattcaagagattgtcagggaaatcagcacctcactttcaatgttccaatccgtgaatcatgaagtgaaagaaggcttgcagattacggatcaaacagcggaaagctttaaacaaatctatgagatgacaacccaaatttccggcgaattgcaaaacttgaacgcgacggttgaacaactgtcagccggatcacaggaagtgtcaagtgctgttgaagatatttctgcagtggcgaaagaaagctcagcaggcattcaggatatcgcagcttcggcggaagaacagcttgcgtccatggaagaaatcagctcttcagcggaaacgttggcaaacatggcggaagaacttcaggacattacgaagaaatttaaaatagaatcataatgaaacgagaaagcggcatatctgctgctttctttttttgttaaaaagcaaaaataaacaaaaacgattcaaaaacaaacagaaatcatatataatgaaaacggatacaaataaaagggtatggaggaatatcaaatatggtgaaacatatatgggattcagagcgagctgcacagctacctaaaggtgtagaggaattggtgtacaggtccaatctgatcgggtcagaccgcactgtctgcaactggggcggggggaatacatctatgaaaacaacggaaaaggattttagaggccgtgaaatagaagtcatgtgggtaaaaggaagcggatcggatttggcaacaatgaaagcgcataacttttccggtttgaaattagatgatatccgcccgctgattaaaagggaccaaatgcccgatgaagaaatggtagactacctgtctcattgtatgatagacagcaaacatccccgcccttcaattgaaacgctattacacgcttttctgccatacaaacatgttgaccatacccatccagatgcgattatcagcatatgctgtgcggataatggaaaacaaatcgctgaagacatttacggaaatcggtttgtatgggtgccatacgtccgtcctggatttactttgtctaaaatgatcgctgaaggcgtagcaaacaacccccacgccgagcttgtattaatggagaaacacggcttagtcacttggggagagacgtctgaaacatgttatcaaaaaacgatatccatcattcaagaagccgagcagtatattaacgatcgtatcaatcagcatgaggtattcggaggcaaaaggtatcagccgctgccggaggataaaagaaaacaaatcttggcaggcatcatgcctgtgatcagaggagcagtaagtgaagaaaagaaaatgatcctttcctatgatgatcatgacgatgtcttggaatttgtaaacagtgtccaagcgccagcactttcgcaaatcggtgcggcatgcccggatcaccttgttcacacaaaacgggttccgctgtacattgattggaatccggaaactcaagatgtgcacaagcttgcagatctgatcaagtcaggagtcgagacctttacatcagagtatcaggcttactttacacgcaatcagcaggatggggatcaaatctttgaatccgccccgcgggtgatattgattcctggaatcggaatggtgaatacaggaaaaagttatgcgatgtctaaagtaagcggggctttatatcggagggccatcgccgtaatgaaaggagcaaccgctctggggcaatttgtttctttacatgaaaatgagtcctaccatgtcgaatattggccgctcgaactatataaactcacgctggccccgccggaagcagaattttcccgaaaagtagcgctgataactggaggagccggcggaatcggcagtgcggcatgccgccgatttgcagctgagggagggcacgtgatcgtagctgatctgaatatagaaggcgcacagaaaattgccggggaaataaacgatgcatacggaaaaggacgggcaatggctgtcaaaatggatgtgacaaaggaggaagacgtacagtcagcttttgaacgagcggcgcttgcttacggcggcattgatatcgtcgtcaataatgccgggctggccacatcaagcccatttgacgaaacaagtctaaaagaatggaatcttaatatgaatgttttaggaacaggctatttccttgtagcccgtgaagcgtttaaacagatgaaacatcaaaatagaggcggaagcatggtatttgtcggatcgaaaaattcagtttatgcgggaaaaaacgcctctgcctacagctctgttaaggcgcttgaaacccatttagcaagatgcatcgcagcagaaggcggagaattcggcattagggtcaactccgttttgcctgatgcagttcttcaaggatcggcaatctggggttcaagctggcgtgaggaacgagccgcggcgtacgggattgaaccggatcagctggaggaacattaccggaaacggacagcattgctcgtcaatatttacccggaggatattgccgaagccattgcattcttcgcttcttccaaagccgaaaaaacaacgggctgcatgatcacggtagacggcggcgtccctgctgcttttacgcgttagatatatgctatgataaaaatataagacggactacgatatgaggaagggcgttaccgatgctagtagcagaacggcagcaaaaaatagtggaaatagtaaatatgcgttcaagcatccgcgtttccgaattaagtgacattttttcagtcacagaggaaaccattcggcgtgatcttgaaaagcttgaaaaagaacataaactgagccggagccacggaggagcggtcagtattcagcagaaggaatcagaaattcatttttctgaacgggaaatcacgaatgtcatcgaaaaaaaagccatcgctcacgaagcggccaaatatgtaaaaagcggagaccgaatcattctcgatgcaagcacaaccgcttggtacatggcaaaaatactccctgacattgagctcaccgtgattacaaactcaatgaaagcagctattgaactcagcaataaagaaaacatatcagtcatttcaacaggcggcattttgctggaaaaatcattatcatttgccggcccgttagcagagcgttcacttgagacctatcatgtcaataaaacctttctgtcatgtaagggatttgacgtacacaacgggatgagtgattcaaatgagtggcaggcgctgctcaaaaaacggatgatcgaaaggtcggaccagaccattttgatggccgattcaagcaaatgggggaaccgcgagttttcacatatcgcctcgctgcaagatgtcagccgccttattacggattctggacttgatccggcatcggtaaaagctcttgaggacaaaaaggtgaaggtgacagctgttcctctttcgaagagagggtgaaaggatgatttatactgccattgatgtaggcgcatcaagcgggagaatcatggtaggtgaactgaatgaagggaagcttgacatacaagagattcacaggttcgctaacggtttcagtcaaagagacgggcattgcttatgggatattgatcatttgctaaaacaaatcctgcaaggactgcaaaaagtaaagacgcttgggtatgaacactgcaccgtaggcattgatacatgggcagtcgattatgtcttactggacgaaaaaggcgatcggttgcgggaagcaatctcctaccgtgatagaagaacagatcacacaatagacaaactggaacataccctctcaaaagccgcaatttatcaaaaaacaggaatacaatttcagcctttcaacacgatctatcaattgtttgaagaagaccgtgagctgctgaaaaagacagacaaaattatgatgattcctgattatttaggctattgtttaaccggaaaagctgtaacggaaatcacaaacgtgtccacaacacagcttttaaacgtctcaacgggaaatcttgatcctgaattgcttgaagccgtgtctgttctggaacagcaatttgcgccgctcactgaaccggggtgtgaactcgggaagctaagaaatgagtggttcccggattatgatctcccggcgtgcaaggtgatgacagtcgcaacacatgatacggcctcggccgtcattgcggcgccaggcgtaaatgatggctgggcgtatatcagcagcggaacatggtcgttaatcggggttgaaaacaaaacaccgataataactgatcttgctttagaaaacaactatacaaatgaacgcggcgcaaacaacaccattcgctttctcaaaaacattatcggcatgtgggtgatacaagaagtcaaacagcagctacaagcagattattcttttcagcagcttgcagaagaagccaaaaaaacagaaccattccagcaatttataaacttaaatgataaacgtttcctgaatccagaaaacatgataaaggaaatacaacattattgcagacaaacccgccaaaagattccccgtactgcaggcgaacttgcctgctgcatctacagcaatttagccatcatctatgcgatagccatcaaagagctcgaaacaatcacagaaaaaccgatcgagcaatttcatatcatcggcggcggagcccggaatgatttcttaaatcaattaacggcagacatgagtggaaaagcggtatatgcagggccgatagaggcaactgccaccggaaatcttttgatgcaaatgattgctgccaaagaagtcaaagacataaaagaagcccggcaagtcgtcagaaattcctttccgatcaaagtgtttacacctaaagacattgatagaagcacgatcattcagtcatttcagcaaactgttttgaaagcgctatctaaatgatgaagaggtgaaaaggtttgaaaagaaaagccagtatcatgtttgtccatcaagacaagtacgaagaatacaaacagcggcatgatgacatttggcctgagatggcagaagcactcaaagctcatggagcacaccattattccatttttctagacgaggaaacaggcaggctttttgcatatttagaaatagaggatgaagagaaatggagaaagatggcggacacggaagtttgccaaagatggtggaaatcgatggcgccattaatgaaaacaaattcggatttcagtcctgttgcgatagatctaaaggaagttttttatttggattgaaaaactgataaagggagagagccgtatgaccataaaagccaattatgacagtgcaaaacaggcatatgaaaaatggggaattgatgttgaagaggcgcttcggcaattagagcaagtgcccatttcgatccactgctggcagggtgacgacattgaaggctttgaagtaaataagggcgagctttcaggcggaattgacgtgaccggcaattatcccggaaaagcgcaaactcctgaagaattaagaagagatttggagaaggctctttctctcattcctggaaagcaccgcgtaaacctgcatgcgatatacgcagaaacaaacagggaagcggtagaacgtgacgaattgaagccgcagcattttgaaaactgggtgaaatgggcaaaaaaccttggtctcggtttagattttaatccaaccttgttttcgcatgagaaagcggctgacggactcaccctttcacaccctgatccggacatcagagaattttggatcaggcattgcatcgcttgccgccgtatcggggaatacttcgggaaagaattaggaacaccttgcttgacgaatatttggattcccgacggctataaggatatcccgagtgataggctgacaccgcgtaaaagactaaaagaatcactggatcggatcttctcagaggagatcagtgaacaacataatcttgattcaatcgagagcaagctgttcgggcttggctccgaatcatatgttgtcggatctcatgaattttatttagcttatgctttgacgaatcataagctttgtttacttgatacaggccatttccatccgactgagacggtatcaaacaagatctcgtccatgctgctttacacagacaagcttgccttgcacgtatcgcggcctgttcgttgggatagcgaccatgtagtggttttggatgatgaattgagagaaatcgctcttgaaattgtacgaaatcatgctcttgagaaggtagccatcggtctggattttttcgatgccagcattaaccgtgtagccgcctggaccatcggaacgagaaatatgatcaaagctttattgtatgccctgcttctcccgaacggatatttaaaacaattgcaggaagagggccgctatacagaaaggctggccctgatggaggaattcaaaacatatcctttcggagccatctgggattcctactgtgagcaaatgggcgttccggtaaaagaggcatggctttatgacatcaaagaatatgagcaacaggtgcttttaaaaaggaaggcatcttctccgattgtctaataaaaaatccgccgcggcatttgcacgcgggcggatttttttaagcttgatcagcagggtatacaatccccatttgctttcttgcttcttccataatttttgcggtggtcaaagaccgttcaaatgtattttcttcagattccagcttattctcttttataagcgtgacaaattcttctgcttcatagaacatcgccggtttaggatcagggatcgcgatgttttcaaggcggccgtcccggtagcggatttcaacacgttcaggccggtgaatcgtatcgattacaatcgtcccgtcttcaccctggatttcagccggggcataggaagtagagattttggaatgcatcagaacagcttcgaacccgtcgtaagacagaatgacagttccttctccgtccactccggaggataaagcatatccgtttgcttttacatccttcggcgcgccaaacaacacaacagccggataaatacaatagacgccaatatccattaatgacccattggaaagctcaggctgaaacgcattcaaaacagttccgcttctgaacgcgtcatatcgtgaggaatactggcagtagcttgcggtaaatctgcggacagtgccgattttatgcaggtgttttttcagttctttgaaattcggcaggaaagtggtcttcattgcttccatgagaacaacgccgtttgccttagccgctgagatcatctcttctgtttcttttgtattcgaagcaaacggcttctcacaaagcacatgcttgccatggttcataaagagaacggcttgttccttgtgaagagcgttcgggctcgctatgtatacggcatcaaagcaatcgctcgccgccatttcctgaaggtctgagaaggcatgcgcagcgttgtgtttagcagcaaactcgccagcgcgttcagccgatcttgaataaacagcagtcagctgaaaatcttcgatatccgctgctgactcaagaaagcggtctgtaatccagttggttcctattattgcaaaacgtatcactcgtatcgctccttttgcatgatatagctaaattatagcttaaaaagaacaaaatcacatgatagatataaatagaatgttaaaaccgagaaagcttttccagcaattaacggtttttatttttcattatagggacgatagtgtacaatttaattaaactatgtatgacggaggaacgatagtggagacgttgcaaacatggagcggcagattcaagcgattcttcttggataataagtttgttttatttttgcttgtgctgctgctgattggtttaaatattctagtatttacaaaaacatcatttattttcaccccgattattgttctgctcaaaacgatatcacttccgattattttgacaggcattgttttttatctgttaaacccagtcgtcgattttctggagagaagaagaataagaagaatctattctatattgctgctatacctattggttatcgggctgatcacgatcacgatcgtgtcgatcattcccttcttaaaagaacaaattatgagtttgattgacaatatcccgagatatgtggacgtcgtagaaaatcagacgaaacagctgattggcagcaacttcgtcaatcaggcccagcaaacgatgaacattaatatatctgatcttgctacaaaggtttcggatcaggcagcgacgatcgtgaacagcacctttaccggtgttgggaattttatcggcgcactgactgagattatcatttcgatcgtcacggttccgtttattctattttatttgctaaaagacggaagaaaattaccggtctacatactgaagtttgtgccgactcgattgaaagaacagacatatacagtcttaagcgaaatgaatcatcggttaagctcttatatcagaggccagatcattgtcagcttctgtatcgggtttttgctgtttatcggttatttgattatcgggctggattatgcttcattgcttgcagtcattgcggcttgcacaagcatcgttccatatttagggccaacgattgccattacgcctgcgattatcattgccatagtgacatcgccgctcatgctgcttaagctggtgatcgtttggacgattgttcagctgattgaagggaagctgatctctccgcaaattatgggaaaaaaccttcacatccatccgattacgattatttttctgctgttaacagccggcaagctgtttggcgttgttggaatcattcttgcgattcccggctatgcggttgccaaagtcattacgacacatttatttgactggtttaaaatgcagtcacatttatacgatgaagaaaaaaatgaaaatacgccggggcataaagtgtgattttcgtttatagttatataagacgggctttccatttatgggaagctcccgttatgtaaaaaaataaatgtctaatggggagaatcaaaatcatgactctatgggaattgtttgtagccgccattttaggaatcgtagaaggattaacagagtacgcgccggtttcttcgacaggacatatgatcatagtagacgacatctggctaaaatcaagtaatctgatgtcagaagaagctgctaactcattcaaggtggttattcagctaggctccattttagcagtagctatcgtgtttaaagaccgaattttaaatttactgggcttgaaaaaaaatattacaagcgaccaggagcagggacataaattaagcattgcccaaattgccgtcggactcgtgcctgcagctgttctcggctttttgtttgaagattacattgatgaatatttattttccgttaaaactgtggccatcggtttaattgccggggcaatcctcatgctttttgctgactgggtcaataaacggaaaacagcgacagacacactcgaccgcatttcctataaacaggcgatagccgtcggcttattccaatgtctttccctttggcctggtttctcgcgttcgggttcaaccatttccggcggtgttattctcggattaaaccaccgagctgcagccgactttacgtttattatggcgatgccgatcatgatgggagccagctttctaagcctcgtgaagcattgggacagcttaagttcggatctgatgccgtttttcatcgtcggctttatctgtgcctttgtggtcgcactgtttgtcgtccgtttcttcttaaggctgattaacaaaatcaaacttgtcccatttgcaatctatcgaattattctcggtgtgattttacttttgatcatgatgtaagtcgaaaaataaggctcttttccgagccttattttttctgtcaattcaagaggaaacagcttgtttttcaaaataaaatcatctataataaacatgacgttacatacggggccatagctcagctgggagagcgctacgctggcagcgtagaggtcaggggttcgagcccccttggctccatacctttaaacccttattcgataagggtttttttgttttgaggaaaaggtttcattctctgaatcctccagttgagtgaagtcaaagtgagcagtttatctgtcaatcatgaattttccaatacctccttttgttcctcaaagaccgtcatgtcttccaaaggaggggagtagacatgaagagacaccattcgttcagatgttggattggacattttgtgaattaaacctttggttgaaataaggcattctccttcgtggacaaagtatgaattggagagttctgcgtgttcgccggttgaacgataaatagaattaagaagctttccttctaacaccattgcacaaccaatggattgaccatgatcgtgtactgttgtctccttgtttggcggaatgttaatcacgataatttccaattcattatttcgatagatggcatttcggccgtaagcgtactggtctggttccttaatatacggttgactcaattttgctgcgtttggaatttgttttaaagacgttgctaaatctttaaccgatggatttttcaagccgccaaaaatgtcttggatacactcatacagttccattcgtttttgcctcccttacattggtatttcataggttaattcatggtatttacccatatacaatttagaggcggcaaacgcccagtgaacacaaaaaaatgtgggggtaaaatgttgtcttatcaccaacttatttgagtttattagttggaatagtggattgaaaggattaaaacggcctgctttaattcgcttgagggaacgagcagggattcataagtgcagttctagacacaatatcggggaaaagctttcaagctttctatgttgtgcttgaaatttactccattgacaaaacacaatcgatttgaaataatatttgattatatgctcattcattcacataattataataaaataatatcatttcccctgaaagggagaatattagaatgaaagctaatggtatgcaaaatctattagcttcttttgttttcaaaaaatgatgtgtttcgcatgtattcatataggaagggatgacaacatgaagacaaaacactattgggtgatttctttgctcgccgtcttagcggtcgggccgggattgatgtctaacacggcattgtcgtcagttcaaggccttgttcagaaaacggttggaacaagtgtctttacatcagtaaatccgatattgatcggcaatatggcctttgccttgttagttccggcaggaccgctgctgaggaaaaaattcggtgctcgtcccgtctatctggcttcattacctgtctttatactaggctcactgctcatcgcatgttcaggcgatattgcattgatggcggcagggcgctttttacaaggggcggcaacaggcgtcatgctgatgattatgattccaatgcttgtactgtcattcccgattgaacgcaggaactatgcactgcttgtgctgatcgggggattctatggttctgttatcatcggtacaatcctgggaaccattgcaacaagctgcgggcattggagatggctgtttttcatctttggcaccttgtccctgatcggtgtcgcggtgagctatttctttcttcatgatgagcatcacggagcggcggatcaagaacagccgcttgatcgtgcgggaattcttttatctgtcttccttgccgcagcctcagcggtttcattcatttttctgcaaaaatgggggctgtcatcgggttatgtatggattggtttcggggtgacgttatgtttgctcattggtctattgattgtggaatataaagtgaaaaaccccttcatatctattaaactgatgctgctgccaaaaccggtgctcggcttattgatcatagctgcagggacgataacggtagctgtcagcctttctgcttttcaaggcttgctccgtcaaatgtatgatatttctcaggagcatctcattcttttaagcttgactcttttaatcggagtggcgatcgcggccattttgagcgctctgttatacgataaagtcggaccagggatgctcggtattatcggcggactcattctcgtttttgtgaattttcaatggctgcatatacaggatcgatcatctctttatatgttcgcggcactgtttatcatgcttgcagcgggaacaggcctgacagtcgccgcagggctgatgggagctgccatgggaggcccgctgcctgatttggtcaagagaatgacagctgttcagtttttaagattgtttgtctatatgggagttcccattctcatcggctttttcacgaaaaaagatgctgccagacaaagcggttcggtacaggattctatgatgactgcttatcatgatctcttcttcatttcttttatccttagcgtgctgctcgtctgcctgtcattttgtatgaatgccactggaatggggcacaagctggcacataaaccacatgataaagcgaaaacagctccggaaaaaccggccgtctcagcacaaggtttgtcgaaggcaactgtcaaatcatataaagtaataaatgatacggaatatcggaatgcactcagaaatttacaaaaatagaaacatggtaaaaaccttttcattgagcgaaaaggtttttattttgcaatcttttcccaactttatccctaaagaattgaaaaatattagaagtgcaagtaaaattctaaaaggtagattcttttacattcgtaatcttttaattcgaaggaaggttttcatggcccgtaaaaaacttaaaaaacgtaaactcttgatttcactatttttccttgtatcgattccgctagctctgtttgttttagcgacaactttatcaaaaccgattgaaatatccaaagaaactgaagaaatcgatgaacagcaagtatttatagacagtctgtccggacatgcccaaattttgtatgaaaaataccatgttctccccagcatcacaattgctcaggccattctcgaatcggactgggggaacagtgaactggctgctaaggccaacaacctttttggcgtaaaagggaattataaaggccatcatgtcacgatggaaacggacgaagttgaaaaagggaaaagaaaaaccattcgcgcgaagtttcgaaaatacagcacgttttttgaatctatggatgatcacgcccaattgttcgtccgtggcacatcgtggaataaaaagaagtataaaccggtgcttgaggcagggaattataaggaagcggcaaccgccctgcaaacatcaggatatgctacagaccctgactacgctgacaaaatcagcgctattgtggaaaaatacgatttagatgagtacgatgaggtaaatccatccctcaaatctgtggatttaaacgcctctattaaagacagtgccgttcaagacgtatggtccaagccttctactgatgatcggtccataaggcttacctctgcccaatcttacgtcggcaaagacataaaggttgtgtctaaaaaacagaaaggccagtctgtatggtaccaattccaaatcaatgataaacttatcggctggattgatgattcagctgttgaaataaaggaggcaacctaagccctttttactggtatttttaattctttgttccattccggggaatttgaggtataatattccacggaagttatcactttttaactatgctttcgggagggaacaaaggtgcagaaatatagacgcagaaacacggttgcctttacagtactagcttattttactttttttgcgggagtatttttgtttagtatcggactctataatgctgataatctggaactcaatgaaaaaggttattacatcgctgttatgatacttgtagcagttggtgcgattcttacgcaaaaagtgacccgtgataacgcggaggataacgaaatcatcgcggaacaggaaaaaagacaaaatcaatctcatatcgaatcataaaaaatccggcgactgcacgccggatttttttgatatcaccctgtaaacacttcgccatcaggataacggatatttgattgctctgtttttgcgaatgaaaacacgaacgttaaaggaccaattcttccgataaacatgatgacaatgatgatacacttgccagctgttgtcagttcaggagtaagccccatcgtaaggccgacagttccgaatgcggaaaaggtttcaaacacaatttgaagaaatggcgcttgttctgtgatcgtcagggcgaaaatccctaaaaacacgatgaacaaactggtgacgctcacagctaaagctttaatgataatcggatatttgatggaacggcggaaaataaccgtttcttttttacctctcaagtaagcaataacagatgttaaaatcacgatgaacgtagtcagcttaatgccgctcgccgttgatgcgcttcctgctccgataaacatcaataataaagtaaatacaattgttccttctctcatgcttccaaaatctagagaattgaaccctgcggttctcggcgtcactgcctgaaaataggaggcccacagtttatccactatatgcaggtggccgagcgtgccggggttgctgtattctaaaataaagaccgtaagcatagcgatcgcattcaacatcagcgttcctgtaagcatgagctttgtatgtaaagaaaaagttttaaaacgccgatttttcatcacatcaaacagaaccgtaaatccgatccctcctgtaataaataagaaagtaatcacgaggttcactgtaggatcgccaacgtagctcatcaaattatcaggccacaacgaaaacccggcattgttaaaagcagatattgcgtgaaacaaacttgcaaacaagccggatgaccagccgtattgaggtacaagccggatggataaaatgagtgctgctatcaattcaatactgatcgaaaacagaaacaggactttgacaaggccaatgacaccgccgattgtcggctggtttaaggcttcctggacgagcattcgttcttttaagccgattttttttcctaatatcatgacgatcaagaccgcaaatgtcataaatccaagcccgccaatctgaatcagccccataattactgtttgcccgaataccgtaaattgagtgccggtatcgacaacagcaagccctgtaacagttgtagcggaagccgcagtaaaaagggcatctatccatgacaatggcttcgtagtggaaatcggaagcattaataggacagccccgatgataatggtaaggaaaaaaccaatggcaagcacttgaggcggtgtaaaccgaacccatttgatcactttatccttttgaagtgtcacctttgtctacatcccttcgttttcaaaacgtttaatatcctttttgtggcccatgatcaccaggcaatcttgctcgcgaatgatgtcttcaggcgcgggggaaagacagatatctccatgatgtttaatggccaggatcgtgcagccgtactttgctcttacattcaggtcaataatcgattttgaatcaagcttgcgcgtagccagcagctcgacaatactgtattcatcagatagatcaatgtaattcaaaacattttcgtctgaaaggctttgtgcgattttaacccccatatctttttcaggatgaataatgcggtcagcgcctattttttcaagcaccttgtgatgataatagttttgagccttcacccaaatatttggaatatcaagctcctttaataatagggtggtcagcgtactcgcttgaatatttgctccgatggcaacaatcacatattcaaaattgcgtattcctaatgaaagcaattcgttttcttcggtggcgttggcaattaccgcatgagtggcgtaagaagcatatgcattgaccttttcttcgttgatatcaaccgcaaggacctcatgccccattctatgaagttctttacaaatgctgccgccaaaccggcccagcccgatcacggcaaattgcttatttttaattcttcccaatgttcatatctcccttagtgaattaacgtttttgaaacaaaaaagaccattgcaaagaatggccgataatagacctcctctctgtatacgcctacgaggttagctgtcggattagggattcagagtaccccctcttacttagtaagattcaccccaaggctgttaataaaacagccaatcgttggttcccccgttcgtgtttgattaagcggtaaaagagactgtatgaaattgaacactcaagaatttactcctgtttctagtgtttgtcaatttaaattttaaaccagaaaaaagataacggggattagagaaaaaggggagggtaaaacgcaaaaaagaccggcgttaaccggtcttttacattagttgcaaccgcaaggctgagtcggaggagtgctgcgcttagccacgtcaatgctggcttctgcgtaaaatttatttccgatgcttaatgatttattctccgcacggaaagtatatgtaccagcggcaggaagtgttttgttattcagttttaatttgaattcgccagctcctaacaaatcaagtgccaaaggaactcttactgttttcccgttattgaggatctgtgttgtacgcaaggcatttccgttcaatgtgtctttcgtgtttgcagtaaatccgcttggcaatgtaaactccataacgccaaggctgagaagcgtgtttggacggtaagtcaattcgatatctgagaaagaccattccgttttgctggcgccagtgattgttgcgaacaatgaagctgtagactgtgttctcatagtggattcagtatgagctttagttgatgtagattcagccgcgaaagaagctgtaggtgcagaaacgagtaacccgagacttaatgcactaattgccaaagaagataataatttgcgtttcataacaaaattccccctaaaaaatgataaattaaacaggcctgcccgcttttcacctcctctgaaaggccaaatacaaattttacctacataaaattaccatcaaatattttggaagtaaatggggtgtttttcccgtatttttcaaatttgtagtagttacatcaaaaaaacgcctagtttcccaggcgttttctgctttactttgtttcgaccggtataaatttaaaaatttctccggtctgcaccgattcagcaagccgtttcagccagtcatagtaagctttagagctttccagctgatcatataactgcagtgcttcatttttgatatcctcatcgagatcttccttgcataaaaccttttgtaaatcagcttgagcttcctcgatcgctgttacattcacttgaacctcccgctcccatttaggtggaaagaaatttgtgaaaaatttaaagaaatccttctcagccacaaatgtatgcttgcggatgccccggtgaaatgtttttttcactacatttaagtcttgaagctttttgacgccagtgctcatgcttggtttgctcatttgcaactcctcacgcatttcgtcaagcgtcatctcatccctcatatacatcgtcccatataaaatcccgacactgcgggtaattccgtaaagatccatcgtttcagcaatggagtcaataacaagatcccgagcctgttctatagctgcaaattctggattttcatccatactgaccctcttttcctttagaaaattaaattcgttaagttatttctttatgttctttatcttaacgaaacatgaggaaaagtcaaaaagaaaaatcaaaatgggactttgacagtttaaaaaccatatgttagattaaggttgttaaaaacattaaatttttatttaacaaactttatttacgtcaaggaggcttatatgagtcaaacattattcattgacggagaatggatcagtgccgaaaaagaacagatccgcagtattatcaacccatttaatcaagaagaaattgcaactgtaagcgagggagggcgagaggacgccatcaaagcaatcgcagccgcacgtagagcatttgacaaaggagaatggtcatcgctatccgggcttgaacgcggaaaaattgttctgaaaattgcggaattaatcagacgcgatcttgaggagctggctgagcttgaatctcttgatacaggaaaaacactcgaagaaagcaaggccgatatggacgatatcgccaatgtttttcaatattacgccggcttggcagacaaagatggcggagagatcatttcatctccgattcctgattcagaaagcaaaattattagggagccaatcggggtttgcggccagatcactccatggaattatccgctccttcaagcgagctggaaaatcgcccctgcactggccgcaggaaacacaatcgtcatgaagccgagtgagattacgccgctgacgacaatcaaagtctttaagctgatggaagaagccggtgttccaaaaggtgtcgcaaatcttgttcttggaccgggagccacagtgggcgacgagcttgccgtaaacaaagacgtcgatttgatttcatttacgggcggaattgaaacaggcaaaaaaatcatgcgggcggcaagcggaaacgtcaaaaaaatcgcccttgaacttggcgggaaaaacccaaatattgttttcaaggacgcggatttagaagttgcggttgatcaggccttaaacgctgtatttttccacgccggccaagtatgctctgcaggttcccgcttgcttgttgaggatgccattcatgatcaatttttggcggagctggtcaaacgggcaaaacgcataaaactcggaaacggttttcatgctgagacagaaagcggtccgcttatttcggcggagcacagggcaaaggtagaaaaatatgtagagatcggaatagaggaaggcgcgaagctggagacaggaggcaaacgcccggaagatcctgagcttcaaaacggctttttctatgaacctactattttctcaaactgtaattctgacatgagaatcgttcaggaagaggttttcggtcctgtattgacagtcgaaaccttcagctctgaagaagaggtaatcgagcttgcgaatgataccatctatggcttggctggagcggtatggtcaaaagacattgaaaagtgcgaacgggtagcagcccgcttgagaatgggaaccgtttggatcaacgattttcatccgtactttgcacaagcgccatggggcggatataagcaatccgggttcggacgcgagcttggaaaaataggccttgaagaatacacagaagtcaaacatgtataccgcaatacaaaaccggcagcggttaactggtttaattcataagagggggagattgatgatgacattaaatatgaaggtagaaagcatgcagaaattccacacatttgaaattccgactgtgattaagcatggaatcggagccatcaagcatacgggtgaggaagtagctgcactgggcgtttcaaaagcgctccttgtcacagaccctgggatttataaagccggtgttgctgatcccgtaatcgaatcacttaaagaagcaggcattgaagtggtactctttaataaagttgagccaaacccgcctgtccgtctggtgaatgaaggatctgagctttacaaaaaagagaactgtaatggtttggtggcagtcggaggcggaagctccatggatacagcaaaagcaatcggagtagaagcgactcacgaaggaagcgtgcttgattatgaagcggcagatgggaaaaaaccgctggaaaaccgcattcctccgctgacgacaattcccactacagctggaaccggatcagaagtaacccaatgggcggttatcacagatgaagaaagagaattcaaattcaacacgggcggtccgctgattgcagcgcacttgacaatcattgatcctgagcttcatgtttcaatgcctccgcatgtaacagctatgacgggaattgatgcgctcgcccatgccattgagtgctatacaatgaaatttgcacagccaatcacggatgcggttgccttaatggcgattgagtatgccgctcattacatcaagagggcatttgctgatggagaggatctggaagcaaggtacggaatggcgcaggctgcgatgcttgccggtctttcttacggaagtgaatcagcgggcgctgctcatgcgatgagccaaacgcttggcggtattatcccagtcgctcacggccaatgtgtagcggcgatgatgggccctgtcatggaatacaactggaagggctatcctgagaagtttgcgcgtattgcgaaagcgttcggtattgatacaagcaagatgacaacagaagaagctgcgaaagcatctgtcaattggatgtatgatctggtcgaagatttagaagtgccgactttagaagagcagggagtatcacctgatatgatcgaacgcttgtctaaagaagcaatgaaagatccgcaaaccttcggaaaccctagagatttaaatgaaaaagcatacaactggatctacaaacgctgctttaaccttacgcctaaaacggtataatcaaaatcccgctcctttacagagcgggattttttgggataatgaagcataggtggaaattttagataagaaggaaggtgccagctgatgtggaagcgtatgactgcaaaagcggaaggcttatatatcgcagatacaaaaagcttcgtaacaaagcaaatggacaagcttgattttgattatggcggcatccccggcgacttgcattttggcctgaccaaaaaagcgggagccagagaaccaatgttttcaagagggactgaaattttcaaccgcagacaaatttcaattgtttcaatagaggaatgcaacgaaatcgctttaaaaatgggagtgccgagaattttgccggaatggctcggggcgaatgtggcagtcagcggtatgccagatcttacttcattaaaagaaggaagccggattatttttccgagcggagcggctctgctgtgtgagggcgaaaatgatccgtgtatccagccgggagaagtcattcagtcttattatccggaccaaccgaagctggcgtcggctttcgtccgccacgcactgggcattagagggattgtctgtattgtggagagacctggtgctgtttacacaggtgatgaaatagaagttcattcctatcagcgaaaagtcaaacgaaaagcagaaagggtctgattaaatcaggccctttctatcttttctttaatttctttcatttggctgaggtgccgtttttcatgatggccgataaaatcgatccactgtctgacagtcagctcttgaaacacaggatgcggaagcactctttcaaaatcttcttctttcagagaggcaatcgcagcagtcagctgctctcttaccacatcaagctcacgtttcatttggctgcctgaaataaaatcatgcgcaggctcaagatgactcggggctttccgtttattatttctgtcctgtgctacttcaagcggtttttcttcaatttctttaatcggagcgtcctttacacgttccttcaacattttttgtgcggtcatatcgatttttttcaaatggtcaagaacttcccgtatgctccattcttcagcagaaggcttttgattcagcttttcgtcagaaagtcctttcaattcgttccacgtttctaatctggcttcattaaagatactcatcatatctcctcctaaaatgacattaccatatatataagcaattatcatttataaagcacttcaaatgggttatttgtcttaaaattttgaaacttttcccgaggtgtctcgtataaatggtaacggcagccgttcatcaatgcattgatgaagaaaggatgaggaagttggagttatttggagtacctatacaaacaatgtatctttatacgcttattattgcgggcagccttacgctgttattcctgtttttcggagatgtattttcagggctgtcagaaggcattccgtttcttaatccgacattagtgctctcattttttacatgtttttcagcgggcggatatataggtgaacttgtattgcctctgtcaagcttgctgattgcgcttttatcttgcatcctttcgatcatgctggtggtattgcttcacatctttgtactggtgccattatcatctgcagaagaatcattggcatatagagaagatgatctcagaggaagactcggtaaagtgattacagctgtgccggttgacgggtttggtgaagtggtcatagaagggataggcgggaccatttcaaagtcagcggtcagttttgataatcagcagatcagttacgggacaacggtgttagtcgtagatattaacaacggagttctttcggttactccgcatgaacccatttaacataaaaggaggaatttgatatgacaatgccgattataatgatcatcggagttgtattctttttattaattgcactaatagctgtgtttattacgaagtatcgtacagcagggcctgatgaagcgttaattgtaacagggagctatctgggtaataaaaatgttcatgtcgatgaaggcggcaaccgtattaaaatcgtccgcggcggaggaacctttgtccttcccgtcttccagcaggcagagccgctaagcctattatcaagcaaactcgatgtttcgacacctgaagtctatacagaacaaggagtgccagtaatggccgatggaactgcgattattaaaatcggcggttctataggagaaatcgctacagcggccgaacaatttttagggaaatcaaaagacgaccgtgagcaggaagcgcgggaggttttagaaggccaccttcgttccattctcggctcaatgacagtagaagaaatctataaaaacagagaaaaattctctcaagaggtgcagcgtgtcgcttcacaggatctcgcgaaaatgggacttgtaatcgtctcgtttaccattaaagatgttcgtgataaaaacggttatcttgaatcattagggaaaccgagaattgcccaagtaaaacgcgatgctgatatcgcaacagcagaggctgataaagaaacccgaattaagcgggcagaagccgataaagacgcaaaaaaatcagaacttgaacgggcgacggaaatcgctgaagctgaaaaaatcaatcagctcaaaatggctgaattccgcagagaacaagatacggcaaaagcgaatgccgaccaagcatatgatttagagactgcccgagcgcgccagcaagtcacagagcaggaaatgcaggttaaaattatcgaacgccaaaaacaaatagaactagaagaaaaagaaattcttcgccgtgaacgtcaatacgactcagaggtaaagaaaaaagccgatgcagaccgttattctgttgagcagtccgcagcagctgagaaagccaaacagctcgcggaagccgatgccaagaagtacagtattgaagcaatggcaaaggctgaggcggaaaaagtaagaattgacgggctagcaaaagcagaagcggaaaaagcgaaaggagagacagaagcagaggttatccgcctgaaaggtcttgcagaagcggaagcaaaagagaaaattgcggccgcctttgaacagtacgggcaggcggcgattttcgatatgattgtcaaaatgcttccggaatacgcgaaacaagcagcggcacctctttcaaatattgataaaatcaccgttgtcgatacaggaggaagcggtgaatcaagcggagcaaacaaagtaaccagctatgcgacgaacttaatgtcaagtctgcaagaaagtttaaaagcatcctcaggaattgatgtaaaagaaatgcttgagaacttttcaggaaaaggaaacgtaaaacaaagcattaatgaattaacaaatgaaatcaaagaagccaaaacgatccaaaaatcagagtaaggaaagggcagaaccgtatggtaactgtacgtgaagcgaagttagaggatataaaggacattgcaaaagtgcatgtagacagctggaggacaacataccacgaaattatcccgattgattatttaaacagcctgaactataaggaatttgaagacaaatggaaaagtcgctcgttaaagggagtatttgttgctcaggacgaaaagggttcagtattcggctttgcttcatttggacctattcgctctgaacaagaaggctatgacggcgagttatacgctatttatcttctggaagagcgccagcggcaaggtgcaggcagggcgctcttagcaaaaggagcggagtttttgcttcaacatggtttttcaagtatgtttgtttgggttattgagcagaatccctcgattatattttatcaggcctattcacctgaaagagtagcggaggacaactttgaaattgccggagtaaggctgaaagaagtaggtcttggctggccggatctttcagctttaaaaacacttcttaacagataacgaaaaatcccccagcggaattcgctgggggattgttacttttacgctttgtcacttttaagcagacggggtgctgtcataaataataaacataggacaattgcacaaataatgaatgaaggaaccatgtaagtcgcattataagttaaagaataaatccataccggtgttccttttggagcaaagctgccgaaaaacacagctcctgaaatgacatgcgcggcatagcgcagcaaactgccgataaaaactgcgctgaccactgaaacaatcaatttcccttttgtttttgatacagcggctttacggacagaagaagcgaaacagccgcttatgccgattgctgcgaaagcgacaatgtaatctaacaatagctgtacaggatgttgagcaaacaagtttccgattgctatttgtactagacctgtcaacaaacctgtagtaagacctgctttgacaccccagcgaaacgaaattaaaaagatcggaatcatcatgatggagaccgagcctccttgaggcatgctaagaaacattcctgagacaatgtctaaaataacggctgccgctgtcataatggcaatttcaataaggcgaaccagttgcttagattgattcatatctatctccttccattgacagacaaccaaaaggacaacaaaaaagcagcacgcggaaggatgagaaaagttccacgcactgctttacgatctgcaattcatttgactttgccacatccctacgccagcgttaactaacaggttcaaagggtcagaacgaaaccgctcactctcagctttaatgctccccttgtggtcatcagtatttagttcgtttctactatacaagaaaacgaaaaaaacaacaagatcacatgactgatgtatatgttcttttaagaaacttatatgatacacacgctttagaaatcatggcgaggattatagtttatttgttttatagattttttttaaaaaactattgcaataaataaatacaggtgttatattattaaacgtcgctgatgcacagcggacacaaactagatgcttcaaaacaacttgaaaaaagttgttgacaaaaaagaagctgaatgttatattagtaaagctgcttcattgagaagtaacgaaatgatctttgaaaactaaacaagacaaaacgtacctgttaattcagtttttaaaaatcgcactattgtttatcatatgtaagatgaaatttttctaaaaaaaacgaggttttatttaaagaataaacagttgtcatattcttcagaaaattaattaaaagagaggtagatttagccttatcctccatcagtttttgatttttctttttaagatgatcaaaaaacaaaatcgctagacatgaaagtagcaaaatcgggagaataattgttaagaaaagaatgttatttgttctatataaaataactcctaatcccagtattaaaattatatcaattattgcagtaacaaagttagcactaaaaaagtctttaatatatataccatcattgaatcgagaaattacctctccatcttctctgttttcaaaaaaattaataggtaattttgttactttattaaaataaacatttgacatctctttatcaactttgtaagacaattttattatcaaatatgatcttacaaaatcgaagatgcaccttattaagaccatacttatgaatattaaagtgattgtgattaaagattctcttaagcttcttgggataattaggtcaactagaaactttatataaaacgacccagctacagcaagacccacaacgaacaaggaagtcaataaaatcacaaaaacgatcaatttatttctaaaaagtatgtccttaaaaaagtaagaatgttttttttgatctttttctttttcaggaattgactctttgtcaatttctaatataaagtttgtgaatttactttcaaaatcctctttttttattttagttattttgtctttatcaggatcactaacaagtaaatagttatttctaatttcgtatattgttatgtaatgtccatattcctccccttctaacaaagctatacaagggagctttatttgttttagggcttcgaatgtcttattttcttgcaattcaagtggcctagtttttatccccatcttcttaaaaataacaattaagtctcttaaactatagccttccttatccccaattaggtctagtaagaaatcaattccatagttaaggttatgaaactttaaaattgacgagatacaagctagtccacaatcatgactattaaactgtttagtatgaacatatttctttttcttattcaatttcaatccccgctttaaatatgagggaatatttaaaatattccctctacaaatgttttatctgcagaattgacgatagttttgacaagcaacagctccgccaccacaaccaattgtaccgccactagcacattgtagccacaacgcagcacactgagcttttcctaatccactacctttttggttttcgagttcctctagtttaacttctttaaatagcttttccatttgtaaaacctccccatttgtttgcaatccggattacattttttaatataaaggaagataaatctaaattcaaccatattttttatttttttttgaaaattataaggaaacttgttcataaatcatagaaaaaaaactttattacctatcaataaacagaattggttgtaatacactaaataaaattgactattatggatttattttgaattaataatgataaaaatttaggtaaatttttaataattatagatacaaaaaagtaccttctattgtaagaaggtacttttttatgttcaaacactaacccttttatacttttgaataaattgttgagctccatttaaaaaaactagaaaacgcttatttgtagtttcaataacaattctatctggttgagcatatggcataccaattttataatcgatattatctgcaactccatacttgtctgactctttaatactaactatttgattaattggaatttctgttttagataaaccaaattttaagactaagcatttttcatcaaaactataacgtgtatttaggaaaacagtaaaaataaagaaaagtgctaataaaatgattatcataactacatattccatataatcactctttcttatgtttttatataattttaccatgttttttaagtttttaaaacaaaaaaactttaagcgatgtgttatataagtttaaatttatcttaactcttatgcccacctgttaatccagctcgttgaagtgcagttcctgctggtgtataagaaactgctctcagaatcgctttagagccgtatttacttctaatcccatccattacaaaaccgagtttccttctcttttcattatccacttcaaataaactcagctgctgattaacatcatcctcaatattcgataacgtgactgagacacttctcacagtcttacccgagtaaaacttattaaaaagcatcaagcagcatctataaatatccatcgtgatacttgtaggaagatcaattgttttggaacgatgaaaaccaccaccaagctcatccttactgtacccaattcccagactgattgttcgaccaactttattatgtgtacgtgcccttcttgcgacttcttcacaaatctccagaagaaccgccttaatctcttcactccttgtgtaatccctcagtaaaatctgactcttaccgaaactaatctgaccttgcatcaacggagcacctatttctgataaatcaattccgtgagcatggtagtacaactggtttcccattattccgaacttcttttcaagcagctctaaaggaaatttggctaactgacctatagtcgatattcccatccgatttaggtttctttccatcctccctcctatcccccacattttagacaaagggcgaaccttccagagtttatttggtacatcttcatatctccaacgtgcaatgccactctttgttttcttactctccaggtcaagtgcaagcttactgagtagcatattgtctccaataccaactgtgcacatcaaaccaaattctctccacatgctgctttggattgctttggccatttcttcaggatcttcttttcctgcatctaaaaaagattcatcaattgaatacgtatggacacatttctcaggaacaaatctgtaaaacagctttgtaatttcagttgaaactctgatgaaaagcttcatttgtggatttacaatgtgtatccttggatcttcaggtatctcaaatagtctcgatcctgttttgattccaaaatcttttttaagtgcaggagatgcagctaatactacacttccctgtctctccgtattccctacaacagcaagatagcatgttaaagggttaagccccattgttacagccgatacagaagcataaaaggatttcatatcgacacaaagtatattcttacgtggaaattgtgagtaatcaatcattgtatgtaactcctatgatgttattcatgttgatataaactgtattgtcattctggtcttttacgtgaagcttttgttgttcaaaatttatgtaatggactctgccggtgacattttcaacgaatccattgtgaaaaagtttaaattgcaactctttgttaaattcaagtgcctcagagacgagaatatccatctcttcaatttgttgatcatctaaggatggcttttcaatttttgatacatcaatcaaatcttgtttaagctgtgtcaaatgttctggaagcatcattgatgtccatttgattgttcctcgatctctaagcatatcgccccactcctttattgatctaatattaacagaacaaacgttcttcattcaagataaaccagaacaaaagttcgatgtaaatgttggtaataaaatataaaggtcaatgatgatttgcgtagtattaataaaggagggattcttttccatgaaggagagtgtaatggttaatgaagaagaggctaatcggatttttggtcttagttcctgctttgattatgtcaggtattactttaatcgaagcaaataaaaagtcccctttggaagtaattgataatattcgggatgaatttggtatattcagtgtgcaaattggtcaaacagatccggcaattacaattggcatggatcaaaccaaaagtgaagcaaagctccgtgagtatttaaaagataatctgtctagagaagcaaaggaaaaatataagatctatatattaaaagatgatattaataaattggagaaagaacatcgagagtatttgaaagcaaataaccccaataagtaaaatgcccagctctttatttaagctgggcattgttttcattatttaaatagaatttctataagcattaattgcttcatttcgtaatagcatattatctttattaaccatgcctaagttataagcttttttgataacatctaatacctgcgaatccattgtagaaaggtttccgcctgcagtaaatctcaatttccagtcttctaaagacttattcaaatcaagcgtgctttttttattctcgggtttaacgatcgcatttttctcaagtttttcgcaaaactcgttaaaacctattgaagattgctgagtattgttctgtccatacccttctgttgctaagctacaaaaagctaagaattttggatctttagttacatcataattagaagtactaatcacctggttcactctctttcaaaatcaattttttgactgtaaacaaaagtggtgcctgagctcaatgctttaatctgtatagagttatcttgaagtgcgtccatgggaatctcaaaatatttatcccagcctattaccaccttattttgaccaaggatagcatcagatttaaacattttagctgtaccgttatacaacagattcttaccgtctttgcctgtgataactgttaacttggtataacccataaaacgagctttcacatatagtttattccccttcaaaacgtttggcgccttggtttgactagaagtgaggttatcccaagcaaaatcgtttccgtctgatgtaatccctgtaatttgtagatagtagagtggtaatgcttctgccgcttttgcttttgatgaatcagtgaaagcgaaagcaacaactgctagaagagcaagcagtgaatatgtaattctcttcttcatttcctaaatcctccttggtacaagtttacatgttaaatatcgtcatttgaagggaattgtttaatatttgaaataaaaaaagaacctgcattaagcaagttcttttcatattgtcaatttattgtgaatttttaacgacaaggacatttatgtatagtataatatttcctgtacataaagtttgctcactcaagggagtcttgctcatcccctatgaaaggggtgggaaaatgactgtttacgaatcattaatgataatgatcaattttggcggattgatattaaataccgtcttgttgatcttcaatataatgatgattgtaacgtcaagccaaaagaaaaaatagaccttcccttgagtttggacacctgaagggttaggcctacgcagatttgacaacgagcaagccctttgatgggcagcttttgtacagagccagggtgctaccaacaccctggtctttttattttatgcatttaattaaacaaaatgcaaaaaataattatataattgtatcattaccctaattataaccatataaaaatggtatttgcaatactattgcttggtgaataaaaccattattttattggaacccagtactttatcgatgcacaagtgatattatccatgattcagttcaaattcttctcttgtcatcccaaagcaaataccatcataataggcacctttagtgaaaatgatctttcttagttgtccctctttcatgaaacctaatttttcatgtaatcgtatggatggattattaaaagaataaacagttgtatttactttttgataagcaagttccaaaaagaaaaagcgaagaaccatcaagatcatttctttggcaaatcctttgcccctatatggctcgaatacagccaaataataaccgaaggtaccatttttcctatcacagtcaaaggtttcaatcatacctactatattattatcactttcaactgcaataaaacggaattcatctttttctaattgttcttctacccattctctcatgttattagctgaacgaggaaaatgtagcgagtccatatttcgcagaatttcatcatctaacgaatcaaatataacgatatcttcaggttgaattgctcgcagtgtaagattctcccctgtccaataagtaactgccattttaactttccctccagttatttccatacgatttcttaactgcttagtaagtcatcatctaattcaatatacagaattccatcatcttctttatcagcttcaattggttcatcaactaaactgaagacaaactcctcaaacgaattggcaattaagaaaaagtctttgtcgggatgacttaattcatgatcccaaaacaatatctttccattatcgatatccatgcatatttcattcccgcctgcagagcttgcgataggaataatatttctaggaaagcgatcagaatatgtatcgattgctttctgaagactgttatgatcattcgctaaaccataaaaaccttctaacaattgtgtatcatcgcccttgcccatccatggatctttctctaaaggtttatagcaaacgtcatactcaatctcatctgttgtttttttactttctaaataacatcctccatatttcttcaaaaagtccttataatctgaaggtaattgattgcctatgttcatttcaagctctttgagttgttcatttgtattaatgctaggatatctgccagcatcaatcgtaaactctttcaacttttgttcgatcttagtgaagctcattttaataccctccgcattgcacatctttagcaatgaacaattgcaatacttttgtttaatagattattcaatttctatgccatcatatgcatcgcctagtgatacataatcatcccttaaccaataccaatgtttacccttattttcaagcagtcgctgtattaaatctgtaaatgaacttgctatcacctgtgtttcgccgactattccatgtcgatcaaaaaaactgtcatagcattttccttttcgctgatcgtttaagtcaattgttaggtattctccttttccatccgtgcaaacaatataccactcggatgaaatgtcttcttcacagagctccccaacaataatgggattagctaattcaaactcagctggtcgtactatgtatattggataatccgcattttcatataaaactgctccaccacattgttcataaaattcactaatatcttttggtagttgatgcttctcgtctattactgggagaccatcagcttcaaacagccgacagtctgatgtagaagcaatcttcttgattaacatgtcaatgctcaagtccgcacctactttctaaagttgtattgattaaatgcgttataatattgctgtctagcttctttaggaacattagcagcatcaaacatcttctcagtaagttcttgtatttctctgggggatacttctttccagtttactttgccgccaactttcttccctgttttttcgaacaaccattctctatatactttcttggtagcgttgtgttgttccttagttaaagctactgttggtgtgttactccctctactcacataattcggaacattgtgtttagcccatacgtccattacaccgtgatgattctctaaaggactgttacttggtctataatcaacgacatcgaaaggttttacttctttatctgaccctttagcaaaactcattagctgattttttaagttttctccatccactacattgtatggcacgtcccctgccatagcaagatcgtacttagggttataaggcagcaaatctggaatcttgacgtccttaattttcttccctgcttgactagctttatttattaccttgcctgctgcatcagctttgttaatggctcctgcaccttttgttccgataacagctgcagccactgagccaattgcatacgttacccatcttgaccttgaataggcatctccattcaccatatccttttgatatgactcttcaattgcagcagatattgcatcatatgttttaactggatgaataactgcattgccaagcgctgacaatgtttctcctggatcggtgatgaagtcccataagccggttacagtgtctttgccaacgtcatataagcctacccctacaccttttacgatgtcccaggtgatttctcctgctccttctagctgctttgcttgttcaatttgcactgcaagctgtacttgagctggctccagattctcgtaccctactttcttagcaatctctaaatattcatcaggatcagacacaccgtcattaagttttttctttaattccttgatttcacgttcctttgcttcttctttcttcacggttaaataagcttctgaatgctgctcaatatcgccttttttcttatgtatgtcactttctctatacgctttggcgctatagtgaatcggtgtggcgttcttccctttgcctgttgattcctgcagctttttaaaatcttgctggatgaattgttcattttgttcagtctcagcgtactctgtttttaaatcctcatcaagcttgtttatcttatcgattgttttttcacgtttgtcatctgcagaggaaagtttgtctttgaagtcttctgttgagaatatttcaagtggaagaatatcattgatgtcgtttaaaatgtctttcattgcttttttctgttcagacataatggattttgattttgtgtatgcatttacaagttcatgttctaagaaggattcttctatgtatgcatcagacatcttagcgtcttcaagttttgcagaaatgctgcttaagaaaacaattttcatatcgataagatcaatccattgatctgtaacgccgacatggtcatgataaaatgctttaatgttgtctgcacccttacctgaaaacttgctgtcgtctaggtcagctacagctttaaacgcttttttgagcttcaccatttgcgaccttagttccttatactctttggttcttttatccgcttcagagagcaatgaatcagcttcaaataccttcatttcattctcctttcaagcctactctatgtaaattttaccacaatcatttgcttgaataacagaaaaagacagccagaactgactgtcttatacatcacactatcttgttctataataattttctgcggtatagtagcgccaatcccaaaaaggttccccattagccaatatataccggtctaaaaatatttcaaagtttaaatttaatggattatattctaaaccactttcaaatatatagagatagttaggatcaccttgattaattttatctttatcgatcattaaatggcattcttccaataagtagccaattgggataccattgataccttcaaacaaatcctcatattttagttcctcttcaatctcttcaaggctaaatagctgaagtcctccacctatattctccccatcagaaagaatctcaaaaattttcgcaccgttatgtagtgtgatgaacttctgataatcctctggaagggaaagctggtgtttagcctcaaagctttgaatgtcattcagggttgctttgtccggtgaaaatgtaacaaggaactccatgatatcaccttctgaacaaaacaattgaatggctcctttttcatctaaaagacttttcaagccatttaccgtcttatgaacaaagttagtcaaataaatcaccccatatttaaatcaaagggatgtttcggcatctctttttggatttctttctattcatattggtaaaagtaataatgttaacaaatatgattcaaaactggctttcaaaggttcctaaagagttaatgacttattttaaaaacctgattaagtcaatgaataattgggaagaagagatattcaactatttcaattctcccattacaaacgcctatacggaatccttgaattgtttgattaagacaaggagccaatattagccatggttattcatttgaagctcttagagcaaaaatattgtttacacaaggttatcgtaaagtaaaaaagaaattcaaagaagttgaagctactttcggaaaattgtgacctgatcaattcccaaattggggtcaaataggctatgaatgggtttatgaagaaaactatggtgctgacttttccatactgactaaagcaatggaggatggttatttttaaccctctttttacactttttcagattacccattttttatccttggtatgaatttgttacaaactcttttgctttattagcaacagcttcccaagtggccgcagcattatcaagatccgtagaaagcttattgatatcctcattctcaaacccttgtgcgagtgaataaaattgatttgctatagaatgccagtttccttcagtttgttctataaactccagagacctttctgcctggtatattacattatgcaagtctatattgatgccgtgaaacagacttaaaacttttacaactaatgcaacttgtgcatctacaccgtttaaattctgaaaattatcaattcgttgtttaaacatttgaacatcagaatactctaacatttcggatactatatacccgattaaagggcctaactcagagctgaattttactttctcatttatctcatgctcttcaagactttcacccaacaattttttaaattgcatgaatatattcaataaatcatgtatctcgctctcatcattgtattgtgaatctaaataagtcattacttcttcaaaagaattgttcaattgtgtaacacctatgaagttgttacctccttgaagaaaggaatttagtagattttgaacatctttcatagattgttgattttcatcgagctctctcataagtataagacagacctcatgaaaatcttgaatagcatcttgtctatcttgatcattgcttgcagttgtaattgcccttaaacctggttgtaatgcttcgtttatcaattccgaagtggtagacccaacattgtatatatcattagccattttattaacacagcttaataatttctccaaccaccagtcacacaactttttatattcgttataaacatcatataatttctgaaaatcttgaggtatttcaacgtttttcggtaagttcaaataagttttcatctcatcattgctcacaggcaaacccgttccagtaagaatattagcttgagtttttgcccaatatccagtagatattagcccatctcttcctaataaaagatcctgtggtccatattgggatgttgcatctaaaagattatcatatttcatttcttgacccgccctttcatatcatctagagtttatatatttaatataacaaaaaacctaccaaattattttattttttcaattttttattcgataaaaaagtaagacgggaatcattttgtagagcagatcgaaaatgaaaatgcagctaaactaattacaatgacagtcgccagttttatttcatcacaagacaaaatttaaggaataatttaattcacaaaaattggatacaggattataattattgatggtttaccgatataaatagagaacaaacattctaaaaggggaaatgaagttgaagaaagtattattaggttttgcagcattcactttgagcttatcgttggcagcctgcagctcaaatgattctgaaaaagtaagcacagaaaaagaaacaccacaagcgtctacggatgtggaaaagaaaacagaacaaaaggaatctactaaagaaaaaactgctgacaagtctaaggaaaaagacaaaaaggaattggtcgatgttactctagatagagctgttgatggtgacacaattaaagttacctacaacggaaatgtagacacagtacgctacttgctcatagacacacctgaaacaaagaaaccaaattcttgtgttcaaccatatggtgaggatgcgtcaaaacgaaataaagaattggtcaacagtggtaagctgcagcttgaatttgacaaaggtgatcgcagagataaatacggaagactattagcttatgtttatgtggatggcaaatctgttcaggaaacattgctaaaagaaggattggccagagtagcgtatgtatatgagccaaatacgaaatacatagatcaatttaagaaagacgagcaagaagcaaaatcagagaagctttcaatctggagcaagaatggatatgtgactgaccgaggatttaatggctgtgtgaaagagaaaaccactgcagttaaaaaagcaacaacatctaaaccggcagcaacacagcctacaactccaaaggcatcaagtgaaacttcgactacaactgaaaaagaagcttcttcagagacaactggaggaacagaaacatttaaaaattgcacagagttaagaaagaaatatccgaatggagtgcctagctcccaccctgcttaccaatctaaaatggacagggatcatgacaactatgcttgtgaacgatgaaaggagataagtgatgggacaaaaatttcataaattaaactctaagtatggaatcatagattatccaatacttttaaaagatcttgagtccatcattcaagaattccctaaatcagaaagaaagttttatgagtatgcaattaaagctttaaaaaaggaagttgggaaaaaggaaaagattttacatatgacttctgcagatccaaagcttactaaatttggttttatggttatcactgaaaagaaacttctatttgtcactatgaaaggcggttttttcgggggtgcagatactgaagttgttgaatttaaaagtatcaaagaagttgacttcgatattgctccaaatcccttgggaatggccacgatgcaattgggtatcctccatttaaaaatcaaaggtaagcttggaatgagtagcaagcgtaccattagaaatattgatgaacattctcttgataaaatagtagctatactaagagagcaaacaaaataaaaagcccgtttttgggcttttctttttttatatggctaagttaaagataaaggttgatttaatattatggataacggagtttcttatattttatgtagttttaaatggatttctaagtttacttggttatttatgttaaactaaatataaagagattgtaataacttccacttaaattaacgggtcagttagtttaagaagatgaataaaaaaacaacacctttcatcaaggggtcttgctaatttaattgttgcaaacttacagagtatctaataagaggttatagataggagatgaactaaatgaaaaaaatagttgaaagtacaacttttccaagaacaaaacagtctataacagaagatttgaaagctttaggattaaagaaagggatgaccgtacttgtacattcctctttatcttctataggatgggtaaatggtggagctgttgctgtgattcaagcattaatagatgttgttactgaagaaggtaccatcgtgatgccttctcaatccgtggaattatctgacccaaaagaatggggaaaccctcccgtaccagaggagtggtgggatattattagagaaagtatgccagcctataattctaactatacccccactactagagggatggggcaaatagtagagttattcaggtcttatccagaagttaaaagaagtaatcacccaaactactcctttgtagcttggggaaaacataaaaacaaaatccttaatcaacatcctttagaattcggactgggtgaacaatcacctctggggaaactttatatacgggaatcatatgtattattattaggtgctgattttgatagtagtacctgcttccatcttgctgagtacagaattccttatcaaaaaattataaacaggggtgcacctataatagtagaaggtaaaagagtatggaaagaatataaagaacttgaatttagagaagaactatttcaagaagtcggtcaagcgtttgaagcagaacataatatgaaagttggcaaagtgggttctgctaattgccgccttttttcacttacagaagcagtggattttgctgagaaatggtttattaataatgatagtaaaaatataaaaaaatagcttggtctaccaaatgagtttagtaacactttttaaaactatcgggttctttaggtttaaaattgacagttaaatcattgagcttggaaggaaatttttcaagcttatttttagtgtccacctgtttagccttttcactgagaaggcctcccactcttttgatcctcgcttaacaatgggagggcttaactcgttataaaaataagcgctctccccttcggaaatacgcctggctatttattaccttattatcatattagccgatgtaaagcaaaacagagtgtcacgttgactcaaaaattttgtcaaatcatttcatccataataatcatctgaattgtaattaaagtactcaaaagtatcttcaatgactttcttgcagatatcacatacatcccaatgtcccatatcattttgttcggtataaactttggacacttcacaagtgcaatagtctacttctttaaacatgcttatcccccttcgtctttgagattatcataccacgtaatccacgaattaacttatgctttatacaatgcggctcgcctcttcattctttaatttccttcactaagtaaatcactttacaaatccaccaaaaatgcagattcaaagccctttgcaactctctgttgtataaatcaattttatatcccccattcagtgactgcataaataatttcatttgggttaggatcatgatctaaatatccgccatatcgagacactagaaccccatatttaaaattaaagtcaataatccataaatcgctgttatttatttgttcccacagaaaattaaagttctctattatccagttaccgttaatcagaaaaattgggctatcctctatccctaaatataagtaaacttgttcatcaggaagcttagtttgttgcacatgattgatcacttcatattcccaactgtattcttttctatgctcactgtatttaattgcaaaatcatttttatgtaactcaaagttccattttttctgaactttatctaggattctttctaattcaggagatgtgattagactacaatcctcaatagtagttgccatatcacgaggcagtgttgacatcaatgttactcggaggcttttttgtttgtttattttcaacttctgtctaagaagcatttttcgattgtccatactatcctccataaataataatgtaaggttaataaaagaagccagagagtatgtgagggaactctctggcctatagtggttgatacaccaactatgatacatatacaggatactttatatttgtgatgtattcaagcagctttcaggtttaaataaaatgtgaattttatttaaactacttaacgtacacttatttatactgctacttatttattgtcctttatatgctcttccccataaatactcttcattgtttcttcacgttttttctcttcccttttctcttcctctggagatactttctttacttctggtatttccatgtttttaagtttgtcatacaccatagggcgtgaatatcttcctgtgctgccgggaaaatatgcgtctatcaagttgtatttattatccatcaacatttcaaactcatagtaagtatccgcttggtttccagttccttttatttcataagaagattgaatgtaatataaaccatcatcccttttttctaccaaacttttttcataatcagctggaattgttctttctggtactccgaacatttctttaacaagccaggatactttttcatagatatctttatgtgtagtacttgtttgagactttgcagaatatttatctgtttcgcttgcatccaactccttttgcccttcttcacttttatagtactcagtgatctgttcacactcttcttttccgtacacttcaatacaatcatccatatttggagtatccgcgagtttattatcattttcctttacaccttcttcggaggattcctctttagactcatttttatttttagaaccatcatttgaattcgcactactttcagcacacccaccagtgaagaaaataaaagatacacaaactaacattgaaaagcgaatattcataaagccctcctggatttataaagtatttacaatgaatttagatgaactaattataacccatgttcaagaaggtttttcataaaatttcaatcaattcaattccttcaaattattgtattgttttcgtattcaatgtcagataaaatattcttaattaagtttctgttttgacattaaacacaaataaagaggtgctaaatttttggagttaaaaaacattgttaattcttacaacatcacaaatattttagggtatcttagacgttctcgtcaggacatggaacgagaaaaaagaacaggtgaagacacactcacagaacaaaaagaacttatgaataaaatacttacggccattgagatcccttatgaattaaaaatggagattggatcaggagaaagcattgatggtcgacctgttttcaaagaatgtcttaaagatcttgaggaaggcaaatatcaggcaattgctgttaaagaaataacaagacttagtcgtgggagttatagcgatgcaggacaaattgttaacctccttcaaagcaaacgattgatcataattacaccatataaggtttatgaccctagaaaccctgttgacatgcgccagatacgttttgagttatttatggctagagaagaatttgaaatgactagggagcgtatgacaggcgctaaatacacttatgcagcacagggaaaatggatatctggactggcaccttatggataccaattaaacaaaaagacgtctaaactagatccagttgaggatgaagcaaaagtagttcaattaatttttaacatctttctaaatgggttgaatggaaaagattatagctatacagcaattgcttcacatctaacaaatttacaaatccctacaccgtcagggaaaaaacgttggaatcaatacacaatcaaagcaattctccaaaatgaagtttatataggaactgttaaatataaggttagagaaaaaacaaaagacggaaagagaacaattagacctgaaaaagaacaaattgtagtacaagatgcgcatgctcctataattgacaaagaacaatttcaacaatcacaagtaaaaatcgcaaacaaagttccccttttgccaaataaagatgaatttgaattaagtgaactggccggtgtttgtacttgctcaaaatgtggtgagcctttatctaaatacgaatctaaacgcatacgaaaaaacaaagatggaactgaaagcgtttatcacgttaaatcgctcacatgtaagaaaaataagtgtacgtatgtgagatataacgatgttgaaaatgcaattctggattacctctcttccttaaatgacttaaatgatagtactttaacaaaacacatcaattcgatgctttcaaagtacgaagacgacaacagtaacatgaaaacaaaaaagcaaatgtctgaacacctttcacaaaaagagaaagagctaaaaaacaaagagaacttcatcttcgataaatatgaaagtggcatttacagtgatgaactttttttgaagagaaaagctgcattagatgaagaatttaaagagctccagaatgcaaagaatgagctcaatggattacaagatacacaatcagaaatagacagtaatacagtgagaaacaacataaataaaataattgaccagtatcacattgaatcaagctcagagaaaaagaacgagctattaaggatggtcttaaaagatgttattgttaacatgacacaaaaaagaaaagggcctataccagctcaatttgaaataacccctatcctaaggtttaatttcatttttgacctcacagccactaatagtttccactaagaaaagtagtaagtatcttaaaaaacagataaagctgtatctcctgtgaacacaatgggtgccaccaagctgttatctgaaaagctgtttcatcaagcaaaccgccacgtccaaaacaaaggaaccttgttttgttcggtccgctttggaaatgttctcggttccagaggttcggtcatccccatattatttgaacagatgatggagggtgaacctctgaccatcacagacaaaaacatgaccagatttttcatgtcaatagacgatgcagctacattgacattacaatcggctgctattacaaaaggcggagaaacctttattttcaaaatggaatcactgaaacttgaagaactgattcatgggtttgaagaatatgcatcgcagcacgggctcccgcggccggctgcagtagaagtgggcaagcgtccaggtgaaaagcttcacgaagaattaacatctccacatgaaattgaatcactgtatgaatggggcaacctttatgcgatccttccagagccggaaaaacatcctgactttcgcaaagtcaatctgcctgggtatcaatcagatcaagccccgctcattacgaaagaaagaattgctcagattattgaagaattgcatcaagagaaaaaggcataaaaacaagcctgtctatccattaggcaggcctgtttttaacagtttatttattaaagagatgcagatagctttcgtatccttcttcttttagcttatgcttcggaacaaaccgcagcgctgctgaatttatgcagtaacgaagtccgtttggccccggtccgtcattaaatacgtggccaagatgagaatcagcagttcggcttcttacttctgtgcgaatcatgccgtggctcgtgtccagtttttcttccacttcttcttcaatcggctttgtaaagcttggccagccgcattgggaatcaaatttatctttggatgtaaacaatggcttgcctgacacaatgtctacatacaacccttcttccttatgatcccaatattcattttgaaatggcggctccgtgccgttattttgcgttacttcatattgcatgcgatttaatgactttattttttcttctttattgtacgccatttatttagccccccaatgctcgctgataaatcccgctcgtccggaacctgtccggtagcgctgataatgtgctggattctttttataaaaatgctgatggtagccttccgcttcatagaaaggttcagcttttaaaatgtccgttacaatcggatctttaaagatgccgctttccgccagacgttgcttggaagcttccgcaagctccttttgtttatcattatgataaaaaatggctgcgcgataggaactgccgcgatcagcaaattgccctccggcatctgtcggatcgatttgctgccaaaataattcaagcagtttttcataagggaatacatcaggatgaaacgtgatttgaacggcttcacgatgtcccgtcgtttcactgcacacctcttcgtacgtagggttttcagtatggccgcctgtatacccggacaccactttttcaattcccggctgttcgtcaaaaggtttaaccatacaccaaaaacagcctcctgcaaatgtggcgatttcttttttttcagacatactggtgcctcctttgttaatacgtggtattattatattatagcatgtaaaaatagaatgaaaatgattctgcttttcaataaaatctataggttttaagcaatatgcttatgtaatggaggttcacaaatttgaaagtaagaacacagatgatgtacgatatggaaactttactccgtaaagtctttaaacaaatacgcaatgaaatcaatgaaattttagataaagagctgtcgcggaatgaattcaccattcttcgaatccttagtgaacaagggcctaaaaaagtcactgaatttgcgcctattttagaggtatcggcaagccacattacggctgtgaccgatgcgctggtagaaaaggaatggattacgagaatcagatcgaaggaagacagacgcatcatccgcattcatatcactgaagcgggcgaaaaagtccttcagcactttaacgagaaaaaaacggaatatttctttaaacgctttgactgctacactgatgctgaacttgccacgttaatcgagctcttcagcaaacttgataaaaaacggtgaaaaaaagcacataccgatatataggtatgtgcttttcgcagtgcttcacttatttttcagtaaacagcttcattgctttccagcggccatatctataatacaaaaatgccgcgcagctgctaaataaaaaactcattccgattccaagcccgattcctttttgtccaagccaagctgaaaatagagctgtgaaaggatacctcaacacccaaaacgagatcaaatttaataccagaacctgcagcatcgctcccgcggccctgacgattccgttcagcacaaaattaaccccaataaaagggtagaaaaacgcgatccacttcaaatattgttcaccaaatgcgaccgcatcaggctcactgataaataaccttatgaggtatttaccaaatacccaaatcataaccgcaatcaccagcatgcaggaaataacagctatcacacctagccttgcaattgttcccactcttttttcgtttccgattccaatattttgccctgccatactattgacggccgtaccggcagccattgctggaagcgtgatgatgctatcaagccgctgcaccgcgccaaagcctgataccacgtgatccccgtatgagttaacaacactcataatcgccatcataccgcctgtaatcaccatcatctgcagacctgccggaatcccgagtttcaaaatcagcgcggactcttcccacttgggcattctcggaatcgagaatggcacaagcttgtgtttgatgacataaaacaacccatacaaaaacgcaatgccctgtgacaaaatcgttgaataagccgctcccgctattcccatgcggaacacagaaataaagagcggcgcaagcactgtattcagtacaacagcaaacgcaataaaccggagaggtgtcttgctgtcgcccagcgcacgaagcacagtactgataaagttataaccaaacaaaaataaaatgccgataaattgaatctgtaaatacgtctcagcaagcggtatcattgactccggcgtttttagaagacgcagcaaaagctctgagagaaaaaaaccggccgcgccgaatccgatgcttaggcctgttaataaaacaacaaaagcgttaatatacgacgccattccttttatatcatcttttcctttttgctgagataaaatggttaacgtcgcattgttaaggcccaaaataaaagacagcacggtcaaaacaatcgtgcttgataccgcggctgccccaagggcctttgcccccagtaaattgccgatccacaagctgtctataaattgaaaggaaacctgcaatgcgtttccgagcataataggcattgaaaacagtacaagctgtttcagcacgttcccctgtgtaaaatcgtatgctttcatcttttctccttgtgttctcaaattttcttcggaccacacgaaaaaagagacgttgtttcatgtctcttttttcatgacttatcggttttttttcggtctcgcataccgaatgtaaacaccatcacacttaggaacaaggcacaataggaaacattcaaatacatttgatccatatcttcagcagccagatgatgataagcaagccagccgaagtacagggaaaatgtaaaggataataaactgaaatactggtaaatccgtttcattttcagtcacctctattgtttaggatggtaataggaaaactcaatttcatctttttctaaatttatcttatccgctttgacatacattccattcgttaaaggcatttctgacaaacgcacttcaatgcttttatctccggggtgaacatggacaaatgacggcaattcataaaagctgtccatataatttaacacaaagctaattggtatactcaatttccctaacgaaaatttcgtgacattcagctctacatcaccgttttttttcacggtcggctcaaaagcgataaacgcatcaatagacgtggaaaatgccttgattttccctgcgacatgaacatcatcatcaatctctactttataatcaagcttgtttgatgctttgtcgtttaaatatgagttaacaaacgcagctaatgattcttttgtgcttgtcacttgaaatccatactcgctctcagatgcatctttcacctgagcctgttcccccggaagcaaaacaagtgccacaaacccggcggcgaggataaaattgattgcaagcaatataaaaaacagtcgcttccacttattcatgctgtcaccctactctttcggtaatccttcttttttaatggcttgatagacgcgctttgcgataagagaataacccgtaccattaggatgaaaatcatcttcctcagaaattcggctgctgtcacttttttgattaaacaaatcttcgatatggacgatttttgcatgtttatcttttttcagctctttttcagcaatatggttccaatccgtgacgacaccatttatttcatttagttctgataatgtaaacgtaaacggattgtacatgctgacataaatcagctcagcgtgatcattcagctcgcgaatttcagaaatgattttttcaaagcgcttttcgtacggtttttccgcttcctgaaacggttcaacggttaattgcagaaagttttggcgaaggattttcatcaaatcattaccgccaattgtaaaaaagacataatctgcgtcctttatgcctttttgaacctttttatcttttagtttttctaataaatcatccgaacggttcccttttacagcataatttttcacgtcgaccgttttgacttgtttatctgaccggatagaatccgccaccttgccgacatatccctttccgtcgggatctccgactccttctgtcagcgaatctccgacagccgctatgacaatgtgttcttttgttttcgtttcatgggctttttgttttccctcagatgatgtacgtatgctcgtacacgcagtaagaagcaaaatcaaactggccatgattgaaaaaatgcgcagcttcaatcttgttgctccttcccattctactagtggaaagtgtatcatgttttagaagatttgcaaatgcctagtctcttagcttacttgagtgtactggctgacttcacatcggaaatgatatcatcgtacggtgtattctccactccattgtaatctttcagcaccttaccgtccggacctaccaaataaaaagaagattgatgaatcacttggtcctctccctccggcttctttacgatcgctttaaagctcttaagtgcgaactcctcaatctcactctggctgtatcccgtgagaaaatcccagttatcaaaagataatggataatttgcggcaaatttcttcagctgtttcggcttatcgttttctggatcaacactaaatgatatgatgcggacatctatattttcggctttcagttttttttgcagatcggtcatatgagcggtcattggcggacatatagtttcacaattggtaaaaataaaatccgccagccatacttctccttttaaactctctaaagaaacgttcttgccgtcttggttttgaaatgtaaaaggctccacctcgtaattgagcggatctttaatctgctgtcctccgcatgcacacaaaaacagaaaaatcagcccagccgttaaccccttgataaccttcatgacatccatcctttccagccagcataaaaacgctttctaaaaccgtccttactgtcccatgtttgtattcgatactgagcaaaaaaaatcctgcatgcctccccattaacgattacaaaggagggcatgcaggtaaaaaacggcatgttacgcgttgtgctttaacacctcttgatgaaatacagcctgataatctgcccacttcatccgccgcttcatataatgtcggaaagaatacacttttgccctgctgtttgatgaaaacacttcttttaagtagaattgcaaatggtgatgtaacataaagaaatagtgctcatcttcctttaatacaggtatttctgtcactttcacctgaatcccgtcaccgcgtttgaactctaggcttttgagtaacaagctatcaatcctcttttttgtttttcttctattatatatgatgccagccgggctgtctgtcattttgcgcggttgtgtaaaaaaattagattagcaaatggaacaagtcctcatccttgttcacctctacataatgaaacggttttttgttcatccgttcaatcagcggcccataatcggctttgttctgcagctcgatgccgacaagagcaggtccattgcttttattatttttcttcgtatattcaaaccttgtaatgtcatcattcggcccgaggacttcgtcaagaaattcgcggagcgcccccgctctttgtggaaaattgacgataaaataatgctgaaggccttcaaaaatcaaggaacgctccttcatttcctgcattcttccgatatcgttattgcccccgcttaccacacacaccacgtttttccctttaatttgatccttgtacaaatcaagcgctgcgacagaaagagctccagccggttcagcaacaaccgcacattcgttatataattcaagaatggatgtacatacttttccttcaggcacaaggagaatgtcatcaacgacagtttccagcgtccggaaggtttcctcgccaatttttttaacagccgccccatctacaaacttatcaattttatcaagtgtgacgacatgcccagctttgtttgattcaaagtaggatgccgctcccgccggctcaacagcaattacctttgtatcaggagacacgtttttcaaatatgtacctaccccagagagaaggccgccgcctccgacacttgcaaaaagaaaatgcggttctgtatcaatgtcgtttaaaatctcgactgcgagcgttccctgtccggccatcacatccggatcatcgaacggatggataaacgtccgagattccgcctcacagcattcagcagcgcttttatacgcgtcgtcaaacgtatcgcctgtcaaaataatatcgataaatccttttccgaatagttcaacttgagatactttttgtctcggtgtagtagacggcataaaaattttcccgtgaatgccaagatgtttacacgaaaatgccacaccttgagcgtggtttccggcacttgcacacacaactccgttctctgtctgctcgctggaaagctgtttcattttatgataagcccctctgagcttaaaagatctgacaacttgcaagtcttcgcgttttaaatagatattgcattcatatctctcagaaagtctgtcattcctctgcaaaggtgtgtgaatgacaacgtcctttacgttttggtgagccttcaaaatgtctttcacttggatgagagagttttctttaagcaacggtttcatgtacagattcctttcttgttttaaatccctatttaatatgccattataacatgaatattcaaaaaataagacaattatttttatttaataattaaaaaaatacagactatgtccaccacatcttgtggtaacttctgttcaaccattatcctgcagagccaagaaaaaagatgatcgtaaaataaagggtgttttcaaccaaaaggcatgatataatgaaaccaattagaaccaaaaggagccaattgatgaatagtgcaccaaaactcaatacatttcaacatctaatcggagaacatcaaacttttctggaagcgaagcgaatcgccaagcagttctcgttatcggagcttcctgtcttaataacaggaaaaatcggaacaggcaaaaatcacttcgcacatgccatacacttggaatcttcgagaagcaatgaaccgtttataagcgtcaattgcagcacccattcggaagaaacccttattcatgagctttttggccctaacggaaacacaggtgtttttcaaaaagcggtacgaggaaccctttttcttgatgatgtatggcgcatgcctgcttctgtacaagctcagctgttaaaagcgcttgattcagacacggagaaaccgcgaatgatctgtgcttctgcagaccgatccgtggaacatacattcaggcaagacttattctacagactgaacattttaacgctcacactgcccgaattatcggaacgaaaaagcgatattccgcttttgacacagcattttctctcaaattctggtcagcaattgttaatcgatccctccgtttttcccgtgcttgagaagcatgcatttgaaggcaatgtcagggaattaaaaaacgctgcagattatatggcggcagtatcaagcgggggaacgattcagccatatgacctgccgccgtatattagaggcacgatagacggaaaaacgtcgaagaaaaaagcgaaactgcttactttaatggaaaaagctgagtttttgtttattttggaaacaataaaagtattgaacgaaaaaggagaacctgccagcagacggatcatttctgaacacagcaaaaatacccaaacctcgttaactcctcagcaggtcagaagccgtctcgactatttggagaaaaaagattatgtcaccaaaagccgcggacgcgcaggcacaaaaattacctttgagggcttgagctttatagagacgttaaaaaatcaaatgatctagcgatcgaaaggagaatgtacttgtttacaatcaaagaagagatcgccaatgcgattacacacggcatcggtgtcctcttatccatcccagcattagtgtttctaatcatatttgcggctaattacgggtctgcatgggacattgtcagctttacaatattcggtgtctctatgctgctgttatatttgagctccaccctgcttcacagcatcacacataaaaaaacgaaggacattttggagattattgatcatagcgcaatttacgtactcatcgccggaacctacacgccttttttgcttgggccgctgaaaggcacactcggctttaccctgttggttatcgtatggtcacttgccctaggcggaatcgtttttaaaattttctttgtgaaacggtttatcctattgtcaaccttcgtgtatttagtcatggggtggctgatgattattgcagttaaacctttatatgcttcactgagcggagcgggattcagcctcctttttctcggcggcattttatactctgtcggaaccatcttttacatttggaaaaagatccccttccatcacgccatttggcacagctttgtattgggcgggagcgctgccatgtttttctgcgtgctcttctattgtgtaaaggtgcctttcctttcgtaacagtaacagaaaagcgcagtcttcacgactgcgcttttttatgcacgtaattgtttttcattggcaggtatataagcttttgaaaaggacaattcaatgtctgccggttttaagcgtttaaaaaacgagccattttgcatgttatctgttcctttcgtttccaccatcaccaacggaagatgatagcgggccgcaagttctacaggatcaatagaaccatctagtgaaagaatcaggctttgtcccttttccagctgttttgtcacatcttcatataccttttctgaatccccgtctgaaatcacatccatccgatccagccattgcccgataaaaggcaagcggaacacttttgggttagcgataaagccggccggttcctcaatatatccagcaattaaggccagttcagccaaacgcaaacggggatgcacatacaaaacaggaccgtgtggtattggctctggctgatggatcgtcacaactgaaccggagatgccgatacagccttctaaaaacgcctttggctgttcgtacacaagagccatctgttttttgtatgacagacggggatcgagcattgtttgattaaataattgtttcatattttttaacagcatatacacaatataaaccactagaaggctgtagcgaaccaattaaaatcctcccgctttagaagaattctttttttcatacattagaaattcgtaatcatacgggtttttttcgtctttggtcccctgctcagaagaaaccagcttccaattggattcatcaaattcaggaaagtgacggtcaccctcaaactcgtgatgaattttcgtcatatacagtctgtccgcataagggaacaggtccgtatagagctgagcccctccgatcacaaagcattcttcagggcctgaacaaatgtccagtacatcctttaatgaactgacaaccgtgcatccctgaaattctgaatccggcgctgaggtaacgacaatatttttccgatttggaagcggacgtccgatcgattcaaatgttttccggcccataatgattgaatggcccgatgttattttcttaaagtatgcaagatcattgggcaaatgccacggcaaatcattgtctttgccgataagcctgttggcatccatcgcaaaaatgaatgaaatcatacgctgaccgccccttttatatgaggatgcggatcataatcctcgatgataaagtcctcaaatgcaaagttaaaaatagaatcaacctttctggcgaaacgaagctgcggaagcggtctaacatctctttccagctgcaaattgacttgttcaatatgattttggtaaatatgaacatcaccaaacgtatggatgaactcgcccggttcaagcccagtcacatgagcaatgatcatggttaggagggcataagatgcaatattaaacggcacacctaagaaaacatcggcagagcgctgatacagctgacaggacagcttgccgtcagacacatagaattggaacaggcaatggcacggcggcaacgccattttatcaatttcaccaacattccaggcgctgacgattaagcgtctggagttcggatttgttttaatatcttcaataagacgggaaatttgatcaatggtttctccatcagctccccgccaagaacgccattgggagccatatacaggtccaagttcaccgttttcatcagcccactcattccagattcgcactccgttttcctgcagatagcgtacattcgtatctccttttaagaaccacagcagttcatgcgcaattgatttaaagtggagttttttagtggtgagcatcggaaagccttcccgtaaattaaatctcatttgatatccgaaagtgctgattgttccggtcccagtccggtctccctttttctcaccatgctctaaaacatgtctgcagaaatccttatactgtttcatttttttcatcctttaaaagtagtcttctagtagtgtaacacaataaaaaatcatttctgaacccagaaatgatttttttatagtcagctgacgacaggcttttcatcctgttctttttcttcatcttgcagatcctgatgcgtatgtgcaattctgctcgccgctgctgcagcaagagctgccacaatatcatccaaaaaggtgtgaataccgtctggactttcatcaagttccttaataattccaatcttctctttatccaaataaccgaaattggtcaaaccgatcgacccgtacacattaacgattgaaagcgggataatttcatctatgccgtaaagcggttcatccgtttcaacaaggtgctgcagcggttcggggagaagtttctgttctgcaagctgatcgagtgcaaggcctgtcaaaacagcatgaataatttcacgtttgttcaggactttttctacattctccatgcaaacactgagcggcagatttggattgtatttttcctgaagtttttgaacaatccgtgcaatatcttctatcataacgccccgtttgttcagcatatcctttgttatatcgaccatttcattcattgtgtactttttcatgtctaatggcatctcctttaggcactcatccagttgggaggcgtgttgcggtcccagtaaatgctcccaagctcatgatgtgattgaaatccatcttctgctgtatgataatgaaaattaaaccagtagccgtcatgaggcgggtggtctcttcgcacatggaatctgagaagatcttctccagttgtccgattgtaaacgttgaaaattttttccgttttgcccgctgaaggcatgcttgagatcacaacatcttggtacgcctcatcatcttgcaatgtcgctaaataatcactaatcacattttcgatttttggcaggatctctttccgatagtcatcctcaatgacaggagcgattctgctgccgaattttaaaaaggactgatcctcagcgctgtcaaggagctgttccttgtacgattgaaaaagcagttcaggatctcgcctgtcatccgactcatcatcgtacaggtcatgctcatcataaaaagcggtgtaatcattctgctcaagactgctcggctgtccggaaggcttgtccgccataagggcagccggaggagatacgagcccgaacgttacaatggtaaataaaaccacaagggtctttctcatccacaatttcatgactgcttattcctctctattttattgtcatgtttctcttattttagcacatccaaaacatgcaagtcatgtactatatgaaactgatatgcaaattaggagattcgttgctatgcactttgtgtaaaaacgcttacaatatttcatgaaaggaggctttccgcatgattgacgctctgtttgccacagtttcactcttaacattattatactttgtcgtcatggaggtcaccgattaacagaaagcccgtgatatgaatcacgggcttgtttgaatgacgccataatggaacagtgctgtttttcttttcatgacgttaaaaccaaactgttcaaaccgcgggcttttccagtggtcttttagcacaacgctttttctggcgactcgtaccgcttcattgatacatccttcgtgcaaaacggaatcctctgccaaatcacgtaaaggcgcgatgccgtcagaggtttctacaggttcatgaaacattggatcgaaataaaccacatcaacagagttgtcagggagctgcttgatgtgttcaaagcaatcaccattcttcacctggattcttctcatcgcagcttgaagctcttctatacccgtttcccatgaatgcagccccgtcctcactaaaacagacacaagatggtttttttcaatcccaacaacagaacccgtttcgcctactgccatacttgcgataatggcatctgaccccaacccgagtgtgcaatctaaaaacgtatccccttcagataagccggcagcccgaagcataggttctttctccccctgtaagaagcgtttggctctgaacatcgctgtattcggatgaaaaaagaatttggcaccttgtttcgtatacagctcaaaccgctctttgccgaccacaagcaaatcacgttcagctgatttcagcaggtgctcaaccgtttgtttattccggccgcagtatggcatatttagctctttagaaagctgctttgcagtttttatggtgtgttcagacggtctatagcttgttgttatcatcttctgtactcccaaaaagaaaatgcccggagaacgggcatttagcagtgcgcatcgaaggcagcagtcagatttttcatgatttcttccatatcgtgtccttcaatttcatgacgcggaataaaatgtacgacttctttgcctttcaaaagagccattgatggtgaagaaggctcctggccagtaaaatactcacgcattttcgcagtagcttctttatcttggcccgcaaatacagtcaccgtattgtcaggtgttttgtcattctggaggactgcctgtgtagccgcaggacgcgcaaggcctgccgcgcagccgcatacagagttaacgactacaagagttgtgccctctgccttttccataaagttttctacttcttccgctgttgttaactcttcaaaacctgctccagtcagctcgcggcgcatcggtacgacaagctggcgcatgtattcttcataagccattgacataaaaaaagccccctctagtatccttcatctgaagtaaaggatactatagagagggccggatttcaaatgttcacgccttaaaataaaagaaagtgtccccagctatctagattttcataataccgccggtgttggcacttgtcacaagtttagaataacgtgccaggtagccggttttcactttcggttcaaaacctttccagttcgcttttcgtttttcccactcttcttctggcacttgtacatccaagatgcgtttttcaatatcaacgataatatggtctccgttttcaacaaaggcaagcggcccgccctcagcggcctcaggtgatacgtggccgattgagaggccacgggaggctccggaaaaacgtccgtccgtaatcaatgccacttttggcccgagtcccattccaacgatttgggatgttggcgccagcatttccggcatgccaggtccgccttttggcccttcgtatctgatgatgacaacgtcgccttcttttacttttcggttgataatgccgtcaagcgcctcgtcctgagaatcgaatacgacagccggcccttcgtgtcttgtaatcccattctgtacgccgcctgttttaatgatagcgccgtccggagctagattaccgaataaaacagcaaggcctcccttttcagtgaatggttgatccagcgggtgaatgacgtcataatcctttacttcatgtccggcaatggtttctccaagagtttttcctgtaacagtcagcgcatctaaatgaagcgctccttctttcttcgaaagctcattcagagccgctgaaacgccgcccgcttcgtgaagatcttcaataaacacatccgatgcaggcgccagcttagccaagtgcggcacgcgctcagcgacttcgttaatgcgttctaaagagtattcaacgccggcttcgtttgcaagggcaagggtatgaagaacggtatttgtagaacctccgagcgccatatcgagtgcaaacgcgttatcaatcgcttttactgtaacaatatcacgcggtttgatatctttgcgaatcgtttccattaattgcgcagccgattttctcacaaactctttgcgttccggagatgttgccagaatggttccattacccggcaaagcaagaccaagtgcttctgacagacagttcattgagttcgccgtaaacatgcctgagcaagacccgcacgttgggcatccgaactgctctagttcttgaagctcgttttcgttgattttccctgcttggtaggcgcctaccccttcgaatactgaggaaagggagatttttcgcccgtcacttgttcttcctgccgccatcggtccgccgctgacaaaaatcgtcggaatgttgatgcgcattgccgccataagcattcccggtgtgattttgtcgcagttcggaatacagaccattccgtcaaaccagtgtgcggatacaaccgtttccacagagtctgcgataatttcacggcttggcagcgaatatctcataccgatatgccccattgcgatgccatcatctaccccaatggtattaaattcaaacggaacgccccctgcttctctgattgcttcttttacgattttcccaaactcctgcaagtgaacatgaccgggaacgatatcaatgtatgaattacacaccgcaataaacggcttgccgaaatcctcttcttttacccctgctgcacgaagcaaactgcggtgcggagctctatcgattccttgtgtgatcatattactgcgtaattctgccatggtgatcctcctaaattctttcaattgtttgattggattttattttgacaattttcagtttatttatgggctgtttttgcaaataagataaatacaggccgccctcaccttgttttgttctttcgtgtttttatatttatatagctttctttcgatttgaaccctccaactattaatattgttacttactataaatagttttcggatatttttcaacaatattcgaaataatttttataaaaagtgaattcacataaaaaaggtgcatgatctgcaccttttttatctttattcgcctttttttctgctttccgtcatttgtttccaaacagaaccttttgcttcttctccatgctcaatacgttcaagcgccattttgacttgaaggctgacctcaaattcggggtcatcttcggcagcgcgcaaagcttcaattgcactttcatcgccgacttcgtacaggaacatggcggcacgccagcgaacaagcttgctggagtcgcttaatgacttgatcatagcaggaatggcttgaggatcgccgatatcagacaggcagtctccggccgttcttctgactgatacagctttgtcctcaagtgctttatacaatagaggaagaacatcaggtgtttcaatcattcctaagtacacaacagcctgtcttctgatggacacctttggatcatccaatgccttctgtaaaaccgggatatcctcttctttcggatccatctgttccaagtgtgcataacgctttttccagtcctcatcatccagcatatcaagcgttactttatacgctttgcgctgtacagcttgttttgcttcgccctttccttgagcggctgcttcagtcagtcgtttcagccgttcatcactgtatgccgcttgaagctcttctgtcacatcatggccgatttcatcaaagtcaccgaatctgacaccttgttctttccaagcccgctcaaacacaacattggaagcttcagatctaagttttaagatcgcctgctgaaagcgttcaggtaagccgaagcgttcttcccgctctccatcggttaatttaacttgcataggaatgccgctgaacatctgcacaaaaacttttacctctccaaaagattcttgatcagaacgattttcttctgcgctttcagcactttccatcccaaatgcagtgcggacttgcggtaaaatgtctttccagtcgtatcttgcattccgttcaacagcaagaaaatctgcgacgtgatatacccctttaactccatctattttaaggatttccgctataacaagcggtgcgccttctgcttgctcaggtttatagttattgcttttgcccgccggaagctcttccgttaagatgactttcattgtattcgggcttggtgtaggttcaattgattttatcttcatgatcgtcctcctatagcatatctgtgacttattctatcatagtcgctccaagccttctattacgacgtttcggcatcaatcccgggtatgtctttttctaattggcggacaaattgaagcataaaattgtgtctttcttctgccagttcccgtgcagtgtctgtattcatcatatctttcagccgcagcagcttatgaaaaaaatgagcgtaggcgctttgctcatctccataaaggccatgcccttttgcgcccgcaaacatgaaagctctcgcaatgccgacagcaccaatcgcatcaagtctgtcagcatcctgtacagcttttccttcaattgagagcggctccttcgccaatttccccctgtcccgaaaggacatccttgttataatatgaatcaccctgtcagcattctcttttcctactccgaaaaaaacgagctgatcatatacttcgctcacagaaagcctgaccgtgtcaggcagcttcacatcaattaaatcatgaaccaaagccgccgtttcaacaatgaacaaatccgctttttccttttctccaatatacgctgcaagatctgctactcttgatacatgatgccagtcatgtccagagctttcgtcagtcaggatagattgaacccatgtcctgatttgctctgcctgcttcaattccttcacaaaaacaccctctttttattgctctaatagcttcacgatatcgtcttccaactctttcggatttgtatttggtgaataacggccaacgatttctccatttctatccactataaatttcgtgaaattccacttgatcgccttagttcccagcatccctttcgcatgttctgtcaaatacacaaacagcgggtgggcgtttttcccgtttacatccacttttgaaaacataggaaatgtaacaccgtaatttgtttcacaaaattcctgtatgtcagcctcttcaccaggctcttggttcatgaattgattgcaggggaaccctaagatctccagcccctcctgctgatatgtatcatataattcctgcagctgcttcaattgggaagtaaaaccgcacttacttgctgtattcacgatcatcagtacctttcccgcgaaaggctgaagtgtcatgtctttccctgtgattgtacgtaccttcatatgataaatagacatgtaagtccctcctatgtccttggtgctgattattttaccttttttaaatcgcaattcaaaatgtaaacatcaattaagaactcataagaaacctaacgatatgagcgtcagttcattatcaattcatatggctcgttttttatcttatcattctataaaacattacaattccctcttacatctttgaaaatcattttactgtgaaaccaaaaggcgtgtcagtgcgttttatttaaagagttttctgttgtttccccctcaacacgtatagatagattgaaaattggcgtgaaaattcctataatgaagaaaattaaacggggaaataatggaggtggcacgttgcctattaatataccaacacacctgccggcaaaacaggtgcttgaaagtgaacatatatttgtaatggatgaaagcagagcatttcatcaggatatccggccgcaaaaaattattatattaaatttgatgccgaaaaaaatccaaacagagactcagcttctcagattgcttggaaattcgcctttacaggttcatttcacatttttaatcccaagcacacacacgccgaaaaatactgcgagagaacaccttgacgaattttacacgactttttccaatatccgtcacaagaggtttgacggcatgattatcaccggtgcgccgatcgagcatttggcgtttgaagaggtttcatattgggaagagctcaaggaaatcatggagtggagcaaaacaaatgtcacttcaaccttgcatatttgctggggtgctcaagcaggtttgtattaccattacggtgtggaaaaaattcaaatgccgaaaaaaatcttcggtgtgttcgaacataccgttctttcaaaacacgaaagattggtaagaggttttgacgagctatactacgtgccgcattcccggcatacagatataaatatggaacagcttcaagcagtgcccgagttaaacattcttaccgcatcaaaggaagccggggtttgcttaattgtgtctaaagacgaaaaacaagtctttttgacagggcaccctgaatatgatacaaatacgcttcttcaagagtatgaaagagatttggaacgaaacctttctactgtcgaggcccctaaacattattttgcaaaaggcagcaacgagccagtgaatcgctggaaagcgcatgccacattattgtttatgaattggctgaattattacgtttaccaagaaactccttatgaatgggactaatttttctttttttagtgatacgctgagcaaaaaatatgataaaatacatctgattcagtctgcgtataacaaaaatttaaaatactggaatccaaatcatttaaaattagcttaactttttcactgcattaataattcgattatgtatttgtgttatgtttatgtatagacaataactccttacgatgcatgaagcttgcttgttgttgattacattgaggtgaatttacttgaataccaataaaagagtattaattttgactgcaaattacggaaatggacatgtgcaggtagccaaaacactttatgaacaatgtgtacggctcggctttcagcatgtaacagtttctaatttgtaccaagagtcaaatccgattgtttcagaggtaactcaatacctttatttaaaaagcttctcaatcgggaaacagttttatcgtttgttttattacggagttgacaaaatctataataaacgtaaattcaatatttactttaaaatgggtaataaaagattgggcgaacttgtcgatgaacatcagcccgatattattattaatacatttccgatgatcgtcgtgccggaatacagacgccgaactggaagagtcattcctaccttcaacgttatgactgatttttgtcttcataaaatttgggttcacgaaaacgtggataaatattatgtggcgacagattacgtgaaggaaaaactgctggagatcggcactcatccaagcaatgtaaaaatcacaggaattccaatcaggccgcaatttgaagaatccatgcctgttggcccgatatataaaaagtacaatctttcaccaaacaaaaaagtgcttctgatcatggcaggtgctcacggtgtattaaagaacgtaaaagagctgtgcgaaaaccttgtcaaggatgaccaagtgcaagtagttgtcgtgtgcgggaaaaatacggctttaaaagaatctttgagtgcgcttgaagcggaaaatggtgacaaattaaaagttctgggctatgtggagcgcattgatgagctatttcggatcacagattgcatgattaccaagcccggcggcattactttgacagaagccacagccattggagtgcctgtcattctgtacaaacccgtgcctggccaggaaaaagaaaatgcaaacttctttgaagaccgcggagctgccatcgttgtgaaccgtcatgaagagattctcgagtcagtcacttcccttcttgcagatgaagataccttgcatcgcatgaagaaaaacattaaggaccttcatttagcaaactcctctgaagtgattttagaggatatcctgaaggaatcagaaatgatgaccgccaaacaaaaagccaaagtgctatcgtaatggcgtacttgagagcatacgaaaatcgtgtgctctttttatttatattcagccatcaataaaagcggttacatttttttatggaacttgcccttcttttgaaaaataagccgtttcgcaacttgacgggtgctcccagatggtgtatagttgaaccatcatttaacaatgaatcaaagttagatgatgacaaaattttttttagcacatgggtgctacagtactaggaggaattaagcaatatgcaaaacggtaaagtaaaatggttcaacaacgaaaaaggattcggcttcattgaagttgaaggcggagacgatgtatttgttcacttcacagctatcgaaggagatggatacaaatcattagaagaaggacaagaagtttcttttgaaattgtcgaaggtaatcgtggacctcaagcttctaatgttgtaaaactctaaactcaatacatgatgatgagatgacaaatagaggagaggcattcgcctctcctatttgattttcatctggatttcaatcgccaaaatgttttgtttacacctctgttcaatctcttcaacatacttttccattgatggttttccttttttcgcgatatcggccagttcttctaaatcactgtatatttctataaatgttttgtgaaggatcaacttcaagtctttatcatccatagctgcgttccccttctctatcaagatacctcaaatagtaaaacggtcctatttattctggttcaatagttatatcggcttatttttattttcttttctattttggtacataaatttcaaaaaaactctgcaaaataatggcggaggtgttttttgtgacttcagaatttcataatgaggatcagaccggctttacggataagcggcagctggaactagcggtggaaacagcgcagaaaacaacaggagccgcgacgagaggccaaagcaaaacattagtcgactctgcataccaagccattgaggatgctagagaactgtcacaatctgaagagctggcagctctcgatgatcctgaatttgtaaagcagcaacagcagctgctagatgacagcgagcatcagctggatgaattcaaagaataaaaaccgcagcttctgcggtttttatttttagtgattggttaagacatctccgtattgtttcaacttttcaccaaccgtacatttattgatacaaaatgaatgcgcataagttttgccaaattctttgcgaaactgcttcttaataaaacagtccttgcaatattcatcgtgcagttctgtcagttctttaaagatcattttcttatccaatatcgtcatctccgttacggtctaatttcgtgtggctttctacgaattgatgggatagaatttttttagcgaggccgtcagcttcctgattgtcttttcgttgtattgtttcgtaggttggagtaagcttcagcgattcaaggagtgcttctattttgtccagccattcattatgagatggatcataacaaggccagctgccgtcaagctgattcagcacaacaagcgagtcccctttgattgtaattgaatttctgcttgccccaagctctcttacttctcttattgcttcataaagcgctgcgtattcagcttcattattggttttcagccggaagcttttattttttctcaagcgatgccgggttcctcccaatgaataatagatgacgatcccgagaccggccagttcgctctctttatcgaaactgccgtcaaaataaacagtaatgtcatcaggctcttgagcaagctcctctgtcagcttttccaattccttcagcgtccagctgccgcctttctcgtcttcgaactctagctccttcatgtatggaaaacggccaagttctctggcgaacgtacgtgcctgctgtgctgtcagccagtcttcgctaaaaaatgagacggatcccgttccttttgcttctattttcaaatgcggtctgagcttcattacaatcaccttaccattcattagttgccgggcttatgctataatcaaaccaatcttaccccggaaaggaagctttttcatcttgtttaataattcgttttggatcttttttgcgatcattcattttatcattgttcttttattttataaaggatttggcaaaatgggactgtttgtttggatcggttttgcgacagtctgcgccaacctccaagtcgtcaaaacagtcgaactgtttggcttaacagcgacactcgggaatgtgatgtatggcacaatcttttttgcgacagatgtgctgaatgaaaaatacggaccagctgaagccagaaaagcggtatggctcggattctcaacgctcctgacgctgacatttgtcatgcagggcgtgctgcttttcgaaccggcttccagcgacatatcacaaacagcgctggaaacgatcttcggattccttccgcgagttgcgttaggaagtctgcttgcctttatcttcagccaaacgctggatgtttatgtatattcggcaattagaaggatatttccttctgatcggcttttatggctcagaaacggcggcagtacagcagtcagccagttgtttgatacattcatattcactgcagtcgcctttctcggcatttatccggcagacgtgtggcttcatatttttatttctacatatttgattaagtttgcggtatctttaatttcattgccttatgcctatgcagccaaaaaaatgatacctaatgatgaaaggagttcataatgcctacagaaatatatgtagacggcgcaagcgccggtaatccagggccttccggtatcggcatttttatcaaacatgagggaaaagcagaatctttctctattccaatcggagtgcatacaaaccaggaagcggaatttcttgcattaattgaagggatgaagctatgtgcaacgcgcgggtatcaatcagtttcctttcgaaccgattcagatattgtggaacgcgccactgagcttgaaatggttaaaaatataacgtttcaaccgtttgtagaagagatcatccgattaaaagcggcattccctctttttttcatcaaatggataccgggcaagcaaaaccaaaaagccgatcttctggcaaaagaagcgattcggctgaatgaaaagaattaaatcttgatcattggttcatcctaatggcgaggtgaactaacatgaaaaagaaagataaaggccggctgaccggcggtgttactccgcaaggcgacctggaaggcaatacacataatgaccctaaaacagagcttgaggagagagcaaaaaaaagcaatacaaaacgctagagaggatctaaacgatctctctagcgttcagcttttcaagcatacgctcaattcctttaatttggtggcggcgaagcatgtcagccgcctgctccatttgcaaagtaaataaagcgtctttcagtgtgcaggccagcggcactgagcaatggatttccgcaagcttcctcgacatctccaaatcgcttaaaccttgctgaatttttccctgctgtccttttggaagaagagaaagattttccaataaacggtcaatcgtttcgtattcacgaatcagtttgtaggctgttttttctccaatgcctttgactccgggatagttatcactggaatcacccataagcgctttaatatcaatcaaagccttcggcattacgcctgtttcttcataaaaagtctcttttgtatagactttataatttccgattcctttttgaagcaaagcaacgcttactttatccgttaacagctgaagtaaatctctgtcccctgttaccaccgtaatgtccgcttcattcgcaaataaatcggcaagagtaccgatacagtcatccgcttcatagccggcaaagccaatattcatgattccaagctctgcggctgcttcctttgccaaatcaaactgcggaatcagctccacaggcggcgcgctgcggttggccttataatcttggaacaagtcatttcggtacgttttgctccccatgtcccagcagcagacgacgtgtgtcggctggaatgtttccacagctgtaatcaaatgctttaaaaagccgttgacgccgttcgtcggcaccccgctgtcatttatcataaagttgcgatgtacggccgtggcaaaaaaggcccggaataaaagagccatgccgtcaaccagcaatagtttattattattcatcaaataactcccttttctttcattccttctattttatcataaagcagcccaaaaataaaaaacagtatctctttaattagagatactgtttgaatatttatcaatcgttgtgtcttttgttgctggcgatcagcttttcagcttcgcgtcctgcgtaagagtcaaaatgggtttgaaatccgtttttctttttggcgttgttattcgcctgtgcatttctgtttccgagctttgttctgcccaacatgaatccccccttacgtcggatgcatatagtatatgcttccggcaggaggttcactcgcgacaggatcatccagcttacatgcggcttacgtattctctgaccatttcttttgatacaagccgtcttgtcgggacgatgccttttttagcgagctgattcatttgctcggtaatttcattaattgcatctgtagtataaggctcatcgtttctgcatttagcaacagcttcttcaatcgccaattcacgcatattttcaagacgcataaatgctttgatatgctcgtgctgttttgatgaatgtgctgaaattgctttatgtacctctgacattaatcgttcatctcgcttttttctatttagtctatcatgacttgaaatacaagccaactgaattttacatttttattgtattgtctgaatttttccaggagatgcacgcctgatacgccatttcaatctctttcgcatgttccccttccgcatatcctcttaaatatgtctctttttgatccgttatttgcgcgattgctttttcacccatatcttcctgtaagcgtctgaggtgagcagtgtaatgagatatcaggctttcttcttcattttttatccatgcctctgtgattttcgtaagtttcatccgtacagcttcgataaaggtcgcttttcctttctgctcaaaaaactgcttcggtgatttgatctcttttagttcctgctcaaaagcacgttcttctatttccggttcaacttccttcaactgtatgccgttcgaatgctgatcacccgcataaacggaaaaataaccgtcctcgtttaatgttttttgaaaatgatccagccattcttcattgatatgccgttcgatgaaaccgctcatgcgaacatcaagcgttttgatttcctgaatatattcaaatagatattcatgtaaggctgttgtcatcgctttactgacgttctttttccaatccccgttttgcagcccgggatgaaatgccgattttaataaatcatttgcaaaatatgataatcgctgtgcaatgtgatatagctgctctcttgtatctttttttactttttcaatgatggtttttgagttccgccgtttctcgatatcggccgctgtccgctcaaatgacagcataaggcactgtttctgcgcttccttctcttctcgggactgatgctgggattggtgaagctgaaaaacagtttcgcatagtttgtctgcctccgaactgagctgcgctgctgacgctttttttacatccacttcgataaaccggtctaagtgttttcttactttcgagaactgattataaaatgactccggttttcccaccagttcctccttacttgatacggtaaagagctgcggctcataaaccccttcttttacaagctctgcgctgacataatcggtcactgtttcgagctctgttttatcttttgcaaggtctgcagcattaataataaaaaacattttatccatgctgagcgattctttcacaagtccaagctttcgcaaaaatgaacggtctccttttgaaaaagagtgctgataataagtcatataaaaaaatgcatcagcatctttgatatattggaatgccagttctgtatgccgtttattcatgctgctcgcgccgggtgtatcaacgatcgtaatccctttttcagtgagcgggcatgtatagtagaccgttacctctttcacagcacaggccgttgtttcctctgctacatacggctttaattcagagagcggaatcgttaatttcttctgttcctgtatatactgctgatacttctcgtatgcaagcaggaaattgctgatcaatttcacgtgttcttcctgcagcctgttttttttgactgccttttcccacttctctgtgaaggaacggcctgccggctcctttggtattccggtgagctgcaaaatttcagccgttaagtcatcctctgtcttaaacactacattcgctgttttgtttaagttgccattgattggctttgtgatcttgttaattgtcgctgtggttggcgttggtgaggatggcagcactctttcgccgacaagcgcattggcaaatgatgatttccccgagctaaagcctccaaaaagagcgagtgtaaatttccgttcctcaagccttttcaccctttcacgaaacgctgaagtttgctttaacaacatgctgcattcgcctaaaatgtcagacaaagtgtaaaagcgtttgatttggtcttgaagcggcatttcttgttccattttgatttctgatttcggcatcggctgcgccgtcagctggcttcggccttgtttctgctctggagccgccactcttgttttcttcgatttaaaccattctgtgtctatatgcattgggcatgcggactcttcttcccaaatggcccacaggcgatcggttttctctcgggcattattctctaaacgtgcctgttcttgaagaaagacaagtttttctgattcttggacgagccggtcgttaattgtttgcacatctttggaaacacgctctttcaccatagcggagagcacctttatgatgtctgcggcttctcttttcgcctctttccggatgagctctgccaagtcttttgtatattgcaatacatattcagaggaaaaggctgcaccatgcttgaccgcgtgttcaatgatgcttatatcaagcggtgtgcgataggcctgaatcagcttttcactttcagcggtatagacatcaaataccttggcgagtttatgaagcgtgtctatcatatgccaatccgcttcggcctctgttcgttttgccacatcagagaaaaaagcattccgccttttatctctttcctgtgcagttttcgctttagaaaagaaaaagccggttttaaaggaaggctcttgtgattctaaaaatgcagccgccaattcacgcatttcaaaaggcgtcaggttggcgttttttaaaatacgattgatttcttcctgcatcctcttctctgcctcagtcatttgtttttcggcctcatccaattgatcacgcagcgattggaccagtccagtatggatattaagctgttcagcgaaactcggagcgcctgtttcgtctttcttcagcatttccgtatgttcctttagcagattacggactttttgttcggttaaagcctgcatattgctttttgattgctgttctattctgcttaactcttctctcagggcccccatctgattgaacgggtgatccggttctgttactgatgtaaaatagagcgcttcccttgaaatcccttcattgcaaagcatctcctctacctgcgcttgatagtctccaaatttcgtctccgtctcatcatggcggtcaatttgattgacgataaaatacacattcggaatgctttcttttattgatctgagaaactttacattttcctcagcgtgcacgtgattatagtgaacgacgtaaaacagcgcatccgcttggtgaagaatagaagcagccgatagaaaatgcgcatcatctgttgaatctatccctggagtatcaatatacgcaaccccggaatcgatctcagtatacctgtcaaaaatttcgacgctttcaatctgttccccgtctttacaatattgctgcaccttgtctttctggtaagtcccttccagctcagcacacgctccgtctgttgtatgaagccgaactcgcttttccccgtttctgatcacaacaaggttagcgcttgtcggaatcgggcttgtcggcaaaatattctccattaacaggcagttcagcagtgacgatttccccgctgaataatgcccggtaaacgcgatataaacctcttcatcagccgcttttttcatgaccgcagccagtttagcagccctttgttcatcttgattctcaataaattgcttataaagttccccggttttatgcaaaagctcttttctgttttgatctgtcataagtctgaacccctttgtgccgtttcaattgtgaacctttttcgaaagatctgaattcattcccttttcattttacacaagaataaaccaaatttctttaggagaatagaaaaaagccgccattacggcagcttctataaaagaaaatctgcaacttttacaagttccagattcatcaaacagatttattagagattccttttaatacaaaaccaattaatacactatatgtacaaaccgctccaagcaaaaacagcattgtcatttgcttcaccatcctgattgagaatctttttcaaacccattttaacatggttgagaatgattttcaatcgctattttacgctgtattcctgtaatgctttgtcttctgcgcgaattctgacgcttaacaacacggcattgaaaatggaaaacagacacatggtgacgtatgcttgataaagcagcggaatcagcaaaatttcgaggataacaacggcatagtttggatgtttcatccatttatatggacctttttttacaagctctacacctggaacaacaaggattttcgtattccaatatgctcctaaggaacaaagcgcccaataccgtacgatctgtacgcttaaaatcactgcagcgataccgagccaccagctggacggctgtttattcatcagcagcacctcggcaattaaggacaggaaaaaaaggatatgcatcgtaatgatatacggatagtggctctcgccaaattcaattgctccttgcttctttaccttttgttcgttttgcctggccactgccatttctgctgctctttgaacaatgagaatggcgatcaacaaccaaaacatgagtcaggcccccttttcccagctgaataatagcaactctgatgagaaacccggccctaatgcgccaatcagtcctcgttcagcttcctttttatgtccgttctgcagatggtctttgatcacatacaagattgtggctgaagacatatttccgtgcttttgcaaaatgctttgcgcagatgaaagcttttctgacgacagcccgagacttttgatgtatgcatcgatcactttttttccgcctggatgcgccaaaaaaacactgatatcatggaatgacagcttatgtttgtccaaaaaaatctgtacatttgttttgagccatttttccaccaaggtcggaatgtctcgtgagaaaatgactttgaatccttgatcggtaaagtcccagcccatgacatcttctgattgtttcatcaaaacagattgggcgtccattatcttcggcgcaagcttcagctttgacaccctgcggtccgccttctctccgcataataaagctgcggcaatgccgtcaccaaaaagcgaggtgccgatcagattgctttttgttttatcttccggctggaatgtcaggctgcacagctcggcagaaatgacaagcacaaaagcctcaggatacgctttgcagtattcggctgcacgcgcaagtccgctggctcctcctgcacagccaagcccccaaatcggaatccgcttcgtatatggagaaaacggaagttcattcataagccgcgcctcgatactcggtgtggaaagacctgtactggagacgaaaaaaacagcttccactttctcataaggaatggcttcttgaaaaaattccggatgagagaggcactcacgaacagccgctctgctgtgtttaagtgtttcttctatgtatatttgatttttttcttcaaagctgtgcccctctttataccattcaatcggcttaacaaactgtctcgaatggatttgcccgtttttaaaggaggataacagcctgtcaatatccttaaaagaatgctgaaacatatagcgggcgaactcggccgctttctcttggtttacattatacgcaggaagacttgttccaatggataaaataaacgccatgcgatcacctctttgcatacattgtgccgcaacaatcttttttatatgcaaaaaaaactccgccgcggcggagttagactgctgttttttgttcagcgaggtcagcttcttgttctatttttttagctttagaaaaaacgttatatacaatatttaagacgactgcagtaaagctgcccgccacaatgccattcgttgtaagcagcgttaaggcactcggaagctgtttgaaaatatccggcacaacggtcacaccgagccccaatcccactgagcaagcaacaatcagcagattttcctgtttcgcaaaatcaatgcggctgagcattttaattccgtaagcaatcaccattccaaacatcgccaccattgcaccgcccaaaacagcggatggaataatagtcgtgaaagcagcgatctttggaaacagcccaaatgccattaggatcacacctgtgaccacaatgacggcattttttttgatccctgtgagctgaacaagcccgacattttgagagaatgccgtgtaaggaaaagcgttaaaaataccgcccagaagcacagccagtccttcagctcgatagcctttagacaaatctatctctgtcaaacggcggtttgtcaggtcacctaaagcaaagtaaacaccagttgactccacaaggctgacaattgcaacgatggacatcgtaatgataggcgctgcgtgaaaagacggcgctccgaagtaaaatggctgaatcatttgaacaactgccgcgtccgaaacattatcaaattgaacttttcccataaaatatgcgatgaaggtgccaatcaaaataccgatcaaaatcgagacggacttgataaagccttttgtaaaacggtatagaagcacaatgatactcaacacggtaaaagcaagtgcaagattggagagatctccgaaatctgcacttccttctccgccggccatgttattcatggcaaccggcatcagtgtaataccgataatcgtaacaacagagcctgtcacgaccggcggaaaaaacgatacgagctttccaaagaaaaatgaaataagaatgacaagaatgcctgaagcgataatgctgccgtaaactgttgaaaccccatattcagatccaatcgctatcatcggcgatacagctgtaaaggtacagccaagcactaccggaagcccgatcccaaaaaatcggttgctccacacttgcagaagtgtagccacaccgcacataaaaatatcaatcgatactaagtaagtcagctgctcgacagtcagtcccattgcttttccgacaatcagaggaacgacaatggcgccggcatacatggcaagaacatgctgaatccctaaagacagcgttttgccgaatccatttctcatgaatgaacctcctgtacgaaggacacttttccttcttctaaagactgaattcttgccaaagattccactcggtagcccagttttacaagttcatctcttcccggctgaaatgacttttcaataacaatgccgattcccgcaatagaagctcccgcttgcttcacaatcgacacaagcccgtgcgctgcctgtccatttgccaaaaaatcatcgataatcagcacatgatcctgatccgacaggtgggtcccagacactgcgatttggctttctgtttgcttcgtaaaggaataaacagacgctgtcagcaagttgtcggtgagtgttaacgatttatgctttctcgcgaagacaactggcacacccagcttcaagcccgtcattacagcgggagcgatacctgatgattcgattgtcacaattttggtaataccgtcttttgcaaacctagacgcaaattcatcaccaattctctgcataagcagcggatcaatttggtgattcaaaaaagaatccactttcaatacctgatcagataatacgacgccttcttcctctattttccgtttcagtgcttccatcctgtctacctccgttatgagaataaaaaaagcattgcccgctcaaataaagagcaagcaatgctgatatcacaaaaaaccgtacacgtgcggttccattgctcacccatagtcggacatttacggtgcccggtagaaacttgcgtgccatatccacgcgattatatgagtgttcctattatattgtaataaattatatcaagattctaatctcttgcataggctgaaaataaaaattcccgaactttaattttgtttttttagatatcattcgtatttcaaggggattcgatataaaagagtctgacgaccgcgccgccaggcttttgattataacagatagagatttgaatatttgtttgataaataatcaattaaatagcgaacattcagctcttctcctgttgcatctttaataatgtctaacggctttttccgttttccgtgaatgtgcaccttttccgtcagccattgctttatcggatggaactctcctctttccaagagagcgtcaaattcagggagatcctcaagcattttttgtttcagctgagccgcatacatgtagccgagcgcataggatgggaagtagccgaaatctccacctgcccaatggacgtcctgtaaaatcccctctgcgtcggtctgcggtgtaatccctaaataatcctggtatttttgattccaaagcgacggcagatcttccacagacacttcattgctgaaaatcgctttttcaatttcataacggatgatgatatgaagaggatacgtcaattcatccgcttcgaccctgataaatgaaggttttgattcattgattgcccggacaaaatcatccagggagatgtccttgaactgtacaggtgatgcctcttgaatcttcttatagtacggagtccaaaaatgcttgttgcggccgataaaattctcgtaaaataatgattgcgattcatgaattcccatcgatgcgccgtctgacaagttcgtgccactgagtgcttcatcaatattttgctcgtaaatcgcgtgcccgcactcatgaatggtcccaaagatcgccgtccggaaatctttttcatcatatctcgtcgtgacccgaacgtctccccgattcagcgtagttgcaaacggatgaacggtttcatcaagtcttccgccatcaaaatcgtagccaagctcctgtaaaaaatacagactgagctctttttgcttttctttcgggaacgcttttgtaataaagcttgtatctggtttatttccggaagctgtcacctgtttaacaagagggataatcgcttccttcagctcagcaaacaactgatcaagcacctttaccgtgacgccgggctcaaacaaatcaagcaatgcatcataaggatgctcttgatatccccaatacgtaataaaacgtttattgaattcaatcagctgttctaaataaggagaaaacaagctgaaatcagattttcctttcgcttcctcccacgctgtttctgcctttgaacacagaatcacgtattctttgtattcagcctcagggattttcttattctcttcatactcttttttcgccagttccactgcttttttcgtatcttccgacaagtcatcaaatcgttcatacaggacatcgataagctccttcattcgatctgatgtttggatattgaatatatctgttgaaagctggccgatactttcggcacgatcctctgagccatttttcggcgcgcctgttctggagtcccagtgcattaacgcaactgcttcgctgtaatgtgagattctttttaaaagatcaaaaaattctttttcatatgtatgtatctccatatccattccctccctattctagccgttccattacaggctaatggaagggggtatgaaagtcaaattgtttgtataaaaggctgccggtatgttttgtggcagcctttttattcagttgatcgtcatttgattttttggcggaggtgttctccgctttttctgcttgatttttttatctacccacactgttgccagcggggttaagagcgaggtgacaataacgcttgtcgcgataattgcagttgccgactcagcaactggcgcaaatgaggcattcgcttccgctaatgcatatggcacggctacagccgcccctgccgtagaagaagcggccactcccgcgacaccatctccccgcgcaataaaacgatcaagcaaaaacaaagaactgcccgataaaatgacgacagaaactccgataaaaatgccgagcagccctgattggatcagcattccaaaattcaaggtattgccgagcgaaaaggcgaaaaatggaatgatcgccggcacaaccttgctgaataagtctctgagatcatgatccagatttccaagtatacatccaagtaaaaacgggatgactgtcgctgccagcgtttcccatgggaatgcggcaagtcccgtcacaccaaacgtcaccatggtcataaaaggaccagattctgtactgataaaggcgaaagcgcccgcatcctcttttcttcccatgtgattcatgagcgccaaatacagtccgccgttcgtttcattcattaccgcgacaattgctaaaacagaaaggcctgcaaaaaagccggattgtatgccatcgtcaggtataaattgcgctgcgatcacgccgagcagcgccgcaaatccgatcttccccaataataacgtgattccttttcttgcgatatagcctgaagaacgaaaatcaatcgttgctcctacgcaaaagataaaaacacccagtatcggcagcgttccggtaatcaaagcacccgtaaaccctccaaagaactccgctgttccaggcgcaaacgtgttgagcgccgctccaagaaatagcggaataatcatcattccgccaggtacccgttcaattgtcgccttgattttcatattgtggattctcccatcctccggttatgaaaaaacaattccacttacacttggaaaacagcctgcaaatcctcttttgaacagctgcccaactggctgccgactccgacggcgccagctccggctctaagccaatcaggcacttcagacggatgtatcccgcctgtcggaataaaggtcacctgcgggaaaggacccgctaaatttttcataaacggaatgccaaacacaccgcttgggaacagctttaatgtcgtaaaaccgaatgtcagcgcttccataatttcgctcggagtcaagacgccggggatataatgtgtctttacaaaagatagatgttcagcaagatcagctgaaaaacccggactgacaataaactgcgcgccagccttagcagcttccccagcttgctgcgcgctgatgaccgtacccgcgccaattaaaatatcttccctattacggaaggattcgataatatctgatgccccgggggtcgtatacgtcacttcaactgcacgaatccctttatctaataaactctcaatctgctgacaggcctcctgcttatcctttgaacgaatgactgcaatcagctttgcttctttcagacggttttcaacgactttggactccatattaataatcccctttcttttggtgaaccgttctttgagcagataaaaaagaagctaatttctccctggtcggcaaaccgtccatatcccccggtgcctgcacttgcaaagcgccaatcgcatttcccctttgcaccgcatccttgtacgacaaaccgtctaggataccgctgattacaccgactgcaaatccgtctccggcgccgaccgtatcaaccacccggtcgacccggcagccttctagaaatccttcacttgtccccgttttaaagtaagcgccttcttttccaagtttaatagcaacaaagctggcaccttttttcaaataatagtcggcaatgccttcaggtgttttttctccggtcaatagctctccctctgcgatacccgggaaaaaccagtctgcaagcccagccagatcattgattgtgtgtaccattgttgcttgatcaggccaaagcgaaggtcttacattagggtcgaatgaaatggtcttccctgcgtttctcatgtcgttcatgacatgatacgtgaagtctttcatctcggctgataaagcaggcggaatacctgtcacatgcaaatggcctgcgcattgaaaataatctctcggatattcagctgtagttaatgtgcttgcagctgagtttttcctatagtaggtaacttgcgggtcgccttctttcacttttgacttcagcagcagcccggtgggattttcgtcctgcgagcggatcacgcgggacacatccactccctcttttttaagctcttgtaaaataaacgttccgagctgatcattgccgaccttgctcatccatcccattcgaaatccgagtctggcaaggccgcaggcgacattgctttctgctccggcaagccctttagaaaaagtggatacttcatgaaggcctccatactcatttgcataaaacatggccattgattccccgaatgtcaccgcatcaagcttcatctcttcccaacctcctcttagttgagggcacctaggattaaagtgactttctcatgatgacttttgcctctaattcaatggtttgaggcgctcctttgtcaccttcaatcctttttaatacacgttccatcgccgtcctgcccatatcatgtgacggctgggcgatcgttgtaatgcctggaccgatcagtttgtaccactccgtatcatcgaatcctgcaatccctatatcttgagggatgcgcaggccaagctcttccatacagctgatgattttcagcataatcaagccattcaaagccagaatcgcttttttttgctccggcatttccttgtgaaaagaacgaagctccgccttaagctgctccttgtcctttacgtcaatttcatgcaatctgacaagcccgttcacattttgaaccgaagccatttcctgatacacagctgctctttctgcacgagggctgatagaggaaatcggttcggtaaacagcgcgacatcagtataccctttgctgtacaccttctgaagaatctcttttgtgatccatctgttgtcagtcgttacggtatccagtttcagatccggcagtttccggtcaattaagattgttggaatttgctgttcagcaaaagcgcggagtacatccttgttttcccctgttgcgtttaaaatcaagccctcaaccgaatgggcttctagctttaagagcatttcccgctctttttcaggactgttatctgtgttgcacaccataatgctgtatccatattgatcacaaacctcttcgactcccctgaaagcagcgaccgaaaaaggatttgtaatgtcagccacaacaaatccgattaacttgcttttttttattttcaaaccttgtgccattttactcggccgataattcaattctgcgattgcctttttaatgtttttcactttttcaggagaaatcgcgtcaatttttccgttaatatagcgggaaactgtcgatttcgaaactcctgcacattcagctacgtctttgatggttgtatggcctgttgttttctttttcattcaagtgctcctgtatctcatatatttgaaaccgatttcaaaaccgttacaacaaaagaataccataattttaaaatttgggaagagtttttttaataatatgtcaattcattattttttcgttgactcttttcactatttatcctaaaattttctttgaaaccgttaccaaaatattttcattcaagtgatgctgaaatcctaaccaagggggaaatataatggaaaatcgttattctgtacatcctgaacaagtaaaacgctttacaacagaggagcttcgcagtcatttcttaatggattctttatttacagaaaacaaacttacgatgtattactcacatgaagaccgggttgtcatcggcggagcggctccagggcaaagtgaactgaagcttgatgcaggtgattttctaaaaacagacttctttttggaacggcgtgaaatcgggattattaatgtcggccagcctggtgccgttagagtcggcgatgatgaatatgtgcttcaaacaaaggattttctctatattggaatgggcaatcaggatgtatcgttttcaagcctgaacggggaaaaagcgaagttttacttcgtctccgcttgcgcccacaaaagctatccgacacaaaaagccgccctatctgaactgacaccggaccgccttggtgatgatgcagcgtctaatgtcagaagtctgtacaaagtcattcatcaggatggcattaaaagctgtcagctgatgatgggaataacgatgttagatcaaaacaacaactggaataccatgccagcacacgttcatgaccgtcggatggaggcttatctttatctggatcttgaaaaggactcaaaggtatttcatttcatgggccagccggacgaaacacgccatcttgttgttggaaatgagcaggctgtcctttctcccgcttggtctattcattctggcgcaggaacatcaaactatagctttgtgtgggcgatggctggagaaaattacacatttacggacatggatctcattccaatggatgggctgaaataagatgggttatctacatgacgccttttcattaaaaggaaaaacagcgctggtgacaggcccgggaacagggatcggtcaaggaatagccaaagccctagccggggctggcgctgatattatcggcacatcacatacaagcagtctgtctgaaacacagcagcttgtggaacaggaaggccggatatttacatcttttacattggacatgagcaagccggaagcgataaaggattctgcagctgagctgtttgaaaacaggcagatcgacatccttgtcaataatgccggcattattcatcgggaaaaagcggaagattttccagaagagaactggcagcacgtactgaatgtcaatctaaacagcctgtttattctgacacagcttgctggcaggcacatgctgaaaagaggtcatggaaagattattaatattgcctctctcctgtcttttcaaggcggcatcctcgttccggcttacaccgcgagcaaacacgctgttgccggtttgacaaaatcatttgcaaatgagtgggcagcgtcaggtattcaggtcaacgcaatcgccccaggctatatttctactgcgaatacaaagcctattcgggatgacgaaaagcgaaatgaggacattttaaagagaattcctgccggccgctggggccaagcggatgatatcggggggactgcagtctttttggcatcacgtgcttcagattatgtaaatggacatattttagcagttgatggcggctggctatcccgctgacaaataaaaaagctgacgaacgatcgtcagcttttttccattacatcatgtgcggttcaacaggcaagacctttttgacctcatcaatgatgcgttcattttctccgccagcgtaaatgtgaatcgagccgctgtcttgattcgagcgaatcaggcgcccgatgccctgccgtacacgtaacaacatatatggcagatcaacttcttcgaacggatcttttttcgctccgttgcgcttcgctgtaaatacaggatcgtgtggcgggaacggtaatgaccaaatggtaacattcttcaatgcgtcaccgggaatgtcgagtccttcccataagtgaactgaacaaagtactgtttcttcttcctcttggaatttctctactaagctgctgatttcctcatcaccttcgaagaaaattggatacggcagctcccatgccgccgacagctctttaaactcgtttaattcttcaaaagaagggaaaagcaccagcgttcttcctttgtatcgtttgattgtttcaatcgtttcagccgttttttgttcagcgtccatatctgtttttgcgtatagattaatactcatttgctcgtcataatcataaggggaatcaacagttaatgacaaataatcatgaatcccaagactgtcggcaatataatcaaacgaaccgccttctgacagcgtagcagaagaaaagatataaggaattttcttagaaaacactttttcgccaagtacttctgctaccgttctcggcatcacgacaaaggttgattctgcttcctttttctccagccagctgatcgcatccttttgatatagagataatgaatacgccatttgttcaacatattcttccactactgacagttcgtattgatcaatcgtatacatttcagactcaaatacaagtgcctcaccgattttatcaagtaaacggcaaagctcgtccgccgcctttttgacacgatggtcattttttatttctaaacggtgtgaaccggctacttcctttgattcttcagaaagaacatagaaaaattcgtcgtttgcgagaagcgcatcttcaatcaattctgcaaactcttctctgatgtcattttgcagcaatcgttctaaaaacaattcaagagtagactgcttcactctataggttagcgctttttgcgcagcaaactctaacaagtgcccctcatcaaatacaactgcactatgatcaggcaagagcggcagctggccctctcgtttgcgtgattcttccgtccacacatgctccatataaaaatcatgggaacaaatgattaagtccgttgacttgcggtagtaatctctggaaagtgtcagaccgcatctgtgtctcatatcacaagtcagacagtcctgaaacgagtcgtagcttacgtcagaccactcttcattcgatagatttgcgtactgcttacggtcgccatacggataaaagcgctgcatcgcctgggactcgtggacaaatgacggtaacgactcataaagatccagccatttatcatcatcagaacgctgcattgttttttcaagcttcttcaagcataaatattgctcatgtgattttgacagccttgtatcaattttcagatcaagatgctcagccagcttagaaatatcgccctcttttttcaccagctgttcaattaatgtttcatccgcacaagcgatgatggcaggtttgccgacataccttgcatagctgattgcaaaaagaagatataccagcgttttccccgttcccactccagcttcggcgaacatgacttttttctctttaaacgcccgctccagctgaaaagccataaatacttgctcgtcccgaagatcaaaccctttttcgggaaggatatcgtaaaacacgtcaccaatccaattgttcaattcttcataaaaattctttgttttcgttaaagaaaaaggcaaacgtgatgttgtcacctagttccaacccccaactattcgacattcagaccaccaataatatcattttccgctgatgaatacaataaaaaacttggcaatgccaagttttttgcagtttacttacgattgatcacatgcgacgataaaaaaggatggtctgttgaataaatatgttctaccgctttttctaaatcagtttgcgcatgcgaaatcacagacggagacgaatcagtcccgagctccttcagctcgtttgctgttgcgtcaagcgccctttgaataagattaaaatgttcgctgttcagcatgagatcacctctgatggaaataatcatcattgtatgcgaacttttcattttatatacatgctttaccgcatgttatcaccgaaacatgcacaaactacacttgatattccgtctccggattatccgtcttatcaacaatattctatcagggagtgatgttgacatgagttatagaaaccgattagatcagcattctgaactgtttcatcacaattggacgcggcctaaacgttcaaagtctcaagtaaacggtcacactgaaatgtcccaaaccaacattatattgagaagcaacgcgaaagctcaccgttggtaacgatagaatagggctgaaagatgaaagaagacgcatgcagagcgtcttctttttatgcgttttctgttttcttgcgctgcggtcttacttttgaccagtattgataataatccgttttaataaacccgttaaagagttttcgtttcttcgttgcttttctgccatatgcttcctcaaagttttcatttgatgtcagcatatacacagaccaagtatcaagcggctcgaacgcctgccccatttctttgtacatctgctcaacggcttttttctcgccgagacgctctccatatggcgggttgccgacaattacgccaaattccagatttgtggtaaagtctttgacctgcatctgtttgaactggattagatctcccaatcctgcttcctctgcattttcttttgcgatttgaaccatgcggtggtctatgtcgctagcgaaaattgtaagcggctgatcataatttgccttttcttcgacttcaagccgcgctttgttccacagatctttaccgatccattcccaatcctctgatacaaaatcgcggttgaatcccggggcgatgttttggccgattagcgccgcttctatcgcgattgttccggagccgcagaaaggatcaacaaacgggcggtcaggcgtccaattggttaattgcaccaaagcggcagcaagtgtttctttaatcggcgcaccgccctgatcgacacggtatcctcgtttgtgaaggcccgtccctgatgagtccagtgtaatcaaagcctgatctttcaataaagatatttccactttatactcagcacctgtttcttcaatccaatcattggctttgccggactgcagcttgagcttttcgacaattgcttttttgacgatccgctgacagtcaggaacgcttgcaagtgttgattttaccgattttccgatgacagggaatttcccgttttcaggtataaatgagcgccagttaatcgctttcgttttttcaaacagttcatcaaatgttttcgctttaaaagaagcaacctgaacctttatgcggtcggctgttctaagccaaaggttcgcacggcagatggcaagtgcatcaccttcaaaaataactttcccgttatcaaccttgcattcgtatcctaaatctcgtacttcctttgcgacaacagcttcaatgcccatcggcgccgttgcaattagtgtatacttcttcatcgtatcaccctgtcttttaaaacttttctcttttcaagataaaagctctccttatacgggagagcttgttttcatcattttaaatgtaagtggtctaacgttctgtaagccatgttttgttccatcgtactgcaaacggctcatcacctcgtactcaggcggcaatcatctatctacagaaagcattctgtccttctctccgttgaattccgttaagaaggttcccctaccaaaatttgggtttctcgctcgaggggtttaccgcgttccactctcaccatttctagtgagacttcgtcactgtggcactttcaaggatactcagccatatccgaagacgtaggcttttttcctgccgtcagcctctaaagactgccctagcttatgacttcgctaggcacgaacactacgggcatctcagcaccgtgcgagcatggactttcctctacagattcaagatctgcagcgattacccgaacgttaagaacatgaattattatataacaactgattacaatttacaagcgccatttttttcaagcgtgatcaatcataaagcttgctgccaaaaacgtgtttttctaagttagacagccgttttaaaatatcaaagtttgttgtgttagattgcacaggctgttttttgctggcttcttcaagctgttttttcagctgcagattttcctgctgcagttcttcaatttcttgatggaaggtttcataatccttaataatcatatctaaaaatttgtcaacgtcttcttgcttgtagcctctaacgcctgttttaaattctttttccaaaatttctttcgcagaaagctttactttatcagcaagcatctttttcacctcgtatcgtgaatcatcacatatattttttcagaaatctgtacggttgtcaaatttctctctcattgttagtagctgtcttcctccactgtcactctcaagtcatccattgtaataaagtagatgggatagccatcctgttcgcgccttttttccgctgtcccaagcatatacttaggggagccttccttttccgggtcatataaaagcagaagcccgtcggacttatcaatgaagaactgatttttttgtttgaattgaagcgggctttcataaggacggtgagtcaggcttgcttcatagtctgcctgagccagaactgcttcatactgttctttattcggttctttccagttcttttcctgctcgtaaaatggtgtgatgacagctacctttaagtcagggtattcctcctgcaaatcatatgcagcttctgccgcccacagctcaactccaagctggcccgaaattaaaatccattctaatccttcatccaaaaaagcaatcagccggtttttaatggctttttttatgtaatacagcgccttgtcatcctgcttaaatatccccagttcaaacggtttatagcccgttattgccaatactttcatcatttcacctgctttaaaaaatggggctcccgtgggccccatttgttgtgctgcattgtttacaccatcaagctgcacgttttccatactagtagtcgcagcaaggttttcctgcttgaaaatgctgatgcgtagccgggtcaacatttgagaaagtgtgtggaaagtagtgaacgtgctgaaaatgctggtggtttacgtttgttgtatgctgtgggtgaatgtgcggcacgatagtcttcgaaaacgtatggtgttcacagcaatgagtaggatggacaattggcgccatcatatgcggtctgcagtgatgcatgataaaatcccctttccataaactttattacaatactaagttatgaaaaataaggggtacatgttctgatgcaaagacctattttaaaagtgtgcaattaagctgtctttaaagtttgaaaacacaaaagcaatcaaaaataccacaacaaagaacaagtaaaaaacacccttatacataccaactctccctttaaaaataactaacgtcattttacaggattcgccgctattctacaacaaaatcaatgtgaattcagcaaaaaaaattcatggcgaaacaagtcgtcttttgcgctttcccggggaatatttaagaggaatatttcctctttagccgggcaattctcacatgcagtttttcagtttctttctctgataagcatgccgcatcgctaagcgattgctctgctacttgcaatgcttttccgaattcttttttcttatgctcaaaatatttcgcgagctctattacagcagcgtatctgcacttctggttttgcgagcgggacagcttttcccaaagcggcactgcttcttccaagcggttttgttttttgtacaggagcgataaatccagccgtgcactgtcctggtcctcaaacgatttttctataagcctttccaactgcttgatcgcttggtccgtttctttatgagccataaaccatttcgccatagcataggcttcactgtgttcttttggcgcatgtgattctgaaaggatttttttagacatatggatgtacaatgaaatgagtgataacacatccatttcattatgatgcaggacaccttttaaaagatccggctcttgcgccttgataaaatgaaagtaaagcattggcgccaagtagcccggtgtgtcttctagcctgcggatgccgagctcctctttttcaaccgtgccaagagatacacggtccattttgtgtttccacaggcgtctagctccatgcaaaagatcaaagtggccaaactccggaagcttcggaagtctgtcacggatcaaggtgtgccttgttttcacctgcggccaatcaaaggctttgccgttgtaggtcacaagtgatgtaatgtcaacctcgcttaaaaagctttggtacaaggcgacttcgttccccggtttgggcaaaagatgctgtttgactgtcactcggtcttcatatactctcgcatgcccaagcaaaaaaatggtattcccagctccacccccaagaccggttgtttctgtatcaaagaaaaagaggttgtttttgttatacccttttgctgacaatgtatgcgacaggccgctttgattccacagtgtgatcacttcctcaagctcagaaaagctgtataacccatggcggtgagaaagcggatattctacttctctgatgaggcaatattcatcttcgaagatgaaaggcttcatgccaaaagcctcccactcttctaaaaacgggatgtcatcaaagtggttttcttgtttgcctgcttctattttttgttctccttcgtcgagcgccatgtgctttttcatccgttggagtttcccttttaatgacatatccggcctccctccttacgacatttgatccaacagctgcaaaattctttcctttgcttttatcccttctatttccgtacctatacaagacggacagccgtcatgacaaggacaatgtgtaatcagttgtttcgccgcttcattaatgtctgaaaaacgtttaaagacttcctccgccaaaccgataccgcccggataatgatcatataaaaatatggttggcaatccggtatgggctgctttaatttgagaaacaacatgaacatcatttcgatcacacatgatatacacagggacaatatgctgcagcacattcgagatgccaagaagcagctgttccagtgtcttttccccgatgtcttcatccgctgttttgatttcgagccaagctgcacttgtatgcagttcttcttccggcaaatgaataggtccagacccaatattttcaaaagtggtcatttttatttttttaaaaatggtcggcagggcattgacagtgacgtctccgtagtgcaatgacgtacggcttttttctttcgttttatcgatttctaataccttcagctgaactgccaggtttgcatccgtataatattcgacatcgacttttctgacatacgcctttttatggtcccaatcgagcttctcaacttgatactgaacgccttcatgcaaataaatcgcttcatcatgcaaaagcgtcatcgcactaaaacggtccatttcaccgataatccttacatttgcaatatccgactgatcaactataacgacattttcctgggaggcggaacgcaaactgatgtttgacgcagggaacgactcacttgcccaatggtaccgttcgccgttgcggtgaagaacagcctcttcctgaagatactcaagaatatcactgacttccatggctccaaattcttcatcagctctaaaaggaagctcataagccgcacactttaagtggtctactaaaataatcaaattctccggattgattcttgcagattccggcgaacgattaaagaaatattcaggatgccgcacaatatattggtcaatcggtgttgaattggctaccatgataatcaaagattcaccgtgtcttctgccggctcgtcccgcctgctgccaagcacttgcaacacttccgggataccccgtcattacacacacttgcagctggccgatatcaacaccaagctctaaggcattcgtactgaccactcctaaaatgtcgccttctctcagtcctctttcgatttctcttcgctctttcggcagatagcctccccgatagcctctgattgattttgttccaatctcttttttcacaagctcctgaatatggcttaaaataatttccacccgaactctgcttctggcaaaaacaatggtctgcactttgtttttaaggaactctttcgccagttcattcacttctgcggttgcgctccttctaatattcagcggtttgttcacaattggcggattgtaaaacacaaaatgcttgcgtccgctcggtgcgccgttgtcatcgaccagccgcatcggtttgcctgtcagctgctctcccaattcctttgggttggcaatcgttgcggaagtacaaataaaaactggatcacttccataaaaccggcagatccgcttcagccgccggatcacatttgccacatggctgccgaacacacctcgatacgtatgaagctcatcgatgacgatatacttaaggttttcaaacaaactgacccatttcgtatgatgcggtagaatggcagaatgcagcatatcggggtttgtaatgacaatatgacctgcttttctcaccttttgtctgattgccggagacgtatccccgtcatatgtaaagcttttaatatcaatgcccatttcatcaataatttcatttagctcgctcttttggtcttgtgccagcgctttagtcggaaataaatataacgcccggtttgtttcatcttgggcgatggactgcaggactgggaggttgtagcataacgtttttcctgatgctgttggcgttacggtaacgatgctctctcctttttgcacatattgaaaagcggaatattggtgagtatatagttcatcaatgccccttttcgaaagggccgctttgattctctcgtctatactttcgggcataggccttgtttttgcttcccgaggctcaatttcatgccaattcacaacgttttcatttccttttaaatcagaaatgagttcagtcagtgatttctttttcattctttacacctctttgtcaagtacagtttaccgaatatttgtttgcatggctaggtgcaaattttatacagttgaataaaaaaagcaaggcatacgccctgcttatttcgcttttattgtaaagagctttgattcgcctttacgagcagccttttcgcctgccgataccattgatcctacagcctcaccattcattataacgattgggatgactgtgctgctcgctttttcttttattaattccaaatcacatgtaatcagcgggtcaccgaccttcactttatccccttctttaatgtgggcagtaaatccttctccgttcatattgactgtctccagcccgacatgaattaacagctcaattcccgagcgagtccgaatgccaacggcgtgtttggtgtggaaaatctgaatgacttcaccttcagcgggagaaacgatttcaccgctagaaggttccaccgctattccttctcccatcattttctgtgaaaaaacagggtccggtacatctgacaggtccattactgtaccgtctgccggagaataaataacctcttctgtcaccttttcctgaattttgcccattccgaataattttttcagcaatgtattttctcccttctcattcacttcaaccgttatcccttcattcaccactatttaaccacactttcaattttgcttcaatttataacaacatctggcatagacgcataatctggttaaaaaaggcggtggcgatattggaattccatgatgacaaaaagaacgaactgcaaaagaaagaagaaatcataacggaggcaatcgacactctttttcaatcctcagcgttcggcaaccttataaacggatttcagaacctaatcaactcgagtttaaaggatgtgcagacgaccatacatgtcagagaaagagatactgggctgtatatcgatattaccattccggcgacgtttcgagatggcgagatcgtcgttgatgttaaatcgaggtatctccatgtaacactccaagaaaaacagaaacaccaaaatgaggctacctttacaagcatgacaagaacggttcagctgccttatgaagttcgccaagaagatatggaaacgtcttggaacgagcagacaatgacacttttctttccaaaaaataagcatgaatgaacgattcattcatgcttctatcatttaaaaaagctggtaaatccctttattaaagatccgacctgattcattgcactcattacttgacctgtcgtatccatcattttattaaaatcaaattgcccattggcttttttgaactgcgacataatgctttgaaattgtgaaggctgctgttgattaggccttgggataggataagggttagaaaatacaggcggctgcataggcataggctggatcggagcataaggctgataataatcctgctgtccataatgctgctgaggcagttgttgctctaaataaccgggtgcagcctgctgataatatccttgcatatgctgaggataataatagcccatttgccgaggatagcttcgagagctcccgttcattgcgattcccccctaaacacaacatatttctcttctatatatgtatgaatgacttctattgtttgtgtcacaagtgatgattagcatttgtcaaattgtgtcgaaagtttaaattttttaaaaacagaaaaaagtcgaatcattatggtaccatattttcaatacagatgagaggggatgcaccataatgaacgtatcatacttaagcaaacgttttgcagaaatgaagaaatatgaaacagactgtatgaataaactgatggactttgccaagttcctctatattcaaggacatctcagcataactgagtttcgtaacagtatgaaggttctcgaagcaaatggagcagaaagcccggcatatgagatgaattaacgtccggccccctataaaaacgaaaagaagacagccttttaccggctgtcttctcttgcaatttcatcctttactgcgtgcaatgtataaaggactgactcagtgatgtccttgaatcgttttttatgaatatgatgaacataagattgaaggaccaattccaggaaattatcctttacggcctcaatttgctctttatgcacatattttggccggcggacttttatcaattcaagagcaccctctgcccagcgagcagccagttcatcattctcttcaactgcaggctttatcgtctcaaaaaaatcataagaatgattactgttttttccttcctgataccgatcagcgcctttttcagcaacttcaatcatttgctcggtcatttccagcaaagtttgtgatagcaatatctttcacctcaatgcctatcgtaccaaatttcactcacaaattcagccgatgcggtataccttctcaaacgcatacctgtgttcaggcgattgatacagctcatttatacaaatatgaagatctatgatttcttcttcgagcacacttaggcgatcgttctccgtttcccgcatctcagcctctaatgcatttacagaatgattcaggctttgctcagctcgcgttaattcatcttctatatcagaaagcatacggagaatatctgtcttgcatacataaccggacattcgtgtacctccctttccttgtctctcccggttaacattctttgctctcaaggctctttccttcctcatgacaaaactagaagcaaatcgccaaacaaacaggtattccacgaaaagctgaagttttcgacaaaaacacccgcaaaaattgtatgatcctcctcattaatgcaaacgatacttgtgaggaggtgccgtatgaaaacaagaccgaaaaaagccggccagcaaaaaaagactgaatcaaaggcaatcgattctttagataaaaaattaggcggcccgaaccgcccttctacgtaagaagcaaggaatttccttgcttctttattttttcagccactgctccaccgcaaaaagcgcatgaagctggcgctttttatgtaaataccagtctgtcaattcaatctgcttcggcaattcctcgcgcctaaagaacgttttctttatctttccatgaaaccaatctgttttcgttccgtctaatgagtggattaactcagggtagcatgtccttagcataggagatgttctttttgtaatcccgatcatcttttccatatcaaaacgggaacctgtgtgcggcactgtgtgcaaaaagtgataaaaagaggagaacaattctggcttgaacagcaattgagacagctgctttcccagccttatcctttcctccgcctttgaaaagcgtttcactgaaatgccgtaaaaaaacccatttgaggaaggaaaaataacggtgttaaaatgaaaccagtcacttaaataaaaaggaatcgtgtcaaaaacattctttttaaacgaaggattttgtataataggtgtttggatagtgttttgttcatttataatgagggcatacattagccgctccgtatttcgctcatgccaaaaacgggtccattcttccgacataaattgtgagacgccaaacacatgcagcagatgaaacagcggtttcccaactctttttgaccagtggtataaaagaagctgcggataggcatccgaaaaaataagccagttcgctctttcataggctaaaaagaaccatttttgctgtctctcacggagtccaagctgaaacagactgccttttaagtcagtcattgaccagccggcattacgagaaacgaaagaagccaaaagcgaccatttgatttccggatgacggtcgtaaaatgctttataagcatttgttcttgaaatgttatccgcgtttttcatttttgtctgccgctcaatccggctcagaagctttctgatggcctgttgttcttgcacgttcattcacttccgtcatgattagtttaataaggaggatgagaaagtgattcggtatcctaatggaaaaacatttcagccgaaacattcggtttcatcccaaaacagtcagaaaagggccccgtcttacagtaatcgcggaatgaccctcgaagatgacttaaacgaaacgaataagtattatctgacaaaccaaattgccgttatacacaaaaagccgacacctgttcaaattgtaaatgtccattatccaaaaagaagtgccgcagtgattaaagaagcttactttaaacaatcatcgacaacagactacaatgggatttacaaagggcggtatattgattttgaggcgaaagaaacgaaaaacaagacctctttccccctgcagaattttcatgaccatcaaatcgagcatatgaagcaggtaaaggctcaagacggtatttgttttgttattatatccgctttcgaccaggtttattttttggaagccgataagctgttttatttctgggacagaaaagaaaaaaacggcagaaaatcaattcgaaaagatgagttggaagaaacagcttatccgatttctcttggatacgcacccagaattgattatattagtattattgaacagctttatttttcgccatcatctggtgcgaaaggttgattaacgaaaggttgagatgttatgtcagatcaatttaacagccgtgaagctcgacgaaaagcgaacagcaaatcgagtccttcaccgaaaaaaggcaagaaacgaaaaaagggcggattgtttaaaaagacccttttcactttactcattctgtttgttttaggcgtagtcggcggtgctgttacatttgccgtcatggtttctgatgcgccgtcccttgatgaaagcaaattgaagacgccttattcatcaacgatttatgataaaaatggaaaagagatcgccgaagtcggcgccgaaaaacggacctacgtctcgatagatgaaattcccgatgttgtaaaagaagcctttatcgcgacagaagacgctcgtttttatgagcaccacgggattgaccctgtccgtatcggcggtgcattagttgccaactttaaagacggcttcggggctgaaggcggaagtacgatcacccagcaggtcgtcaaaaactcccttctttcacatcagaagacgttgaaacggaaggtgcaggaagtatggctttcgattcagctggagcgcaattactctaaagatgaaattttagaaatgtatttaaaccggatttatttttctcctagagcatacggaatcggaaaagcggcggaagaatttttcggcgttactgatttaagcaaattgactgtcgaacaggctgcgacgcttgcaggaatgccgcagagcccaacagcgtacaacccggtcaaaaacccggataaagcggaaaaacgacggaacatcgtactcagtctgatgaaaaagcaaggatttatttctgattctcaatataacaaagcgaaaaaagtggcagtgaaagacgaaggcgtcgtgtcacagaaggaatatgaaaaagcaagtacaaacaaatacagcgcatttgttgaagaggttatgaaggaaattgatgaaaaatctgatgtcgatccatctgctgacggattaaagatctatacgacattagatacaaaagcacaagataaactagatgaattaatggacggagacaccgtcggatttactgaaggcatgcagggcggtgtgacgcttctcgataccaaaaacggagaagtccgagcgattggtgcgggacgcaatcagcctgtcggaggctttaactatgctactcaaactaaggcacagcctggttcgaccataaaaccgattttggactacggaccagttattgaaaataagaaatggtccacatacgaacaaattgatgactcagcttatacgtattctaacggaaaaccgattcgtgattgggaccgcaaatatctagggcctatctcaatgcgttacgctctggcccaatcaagaaatatacctgctttaaaagcattccaggcagtcggtaaagatactgctgtagactttgcaaatggactcgggcttggtttaacaaaagataatgtaacagaggcctattctattggcggtttcggtgggaacgatggtgtttctcctctgacaatggcaggtgcatacagcgcgtttggaaataacggaacgtataatgaaccgcattttgtaaaatctatcgaatttaacgatggcacgaagcttgacttaacaccaaaatcaaaatcagccatgagtgattatactgcgtttatgattacagatatgctgaaaacagctgtgaagacaggtactggacagcttgcacaagtacctggtgtagaagttgcaggaaaaacaggaacgactaactttgatgataatgaagtcaaaaggtacaatatcgctagcggtggcgcccgagattcttggttcgttggctacacaccgcaatatacagctgccgtctggacgggaatgggagaaaacgaggctggaaagaaatcactttcagctgaagagcaaaaagttgcaaagcgcatcttcgcccagctcatcgccgatgtcgatgacggaagcggatcatttgagaagcctgacagcgtagtggaagccaccgtagaaaaaggttctaatccggcaaaactggcagggccaaatacgccaagcgataagaagctcacagagtactttgttaaaggcacagctccttctactgtttctaaaacatatgagaaagaagaaaaagaggaaacagctaaactgtctggtttaaacgtgaaatacgataaagacaatcaatctttaacgttaagctggaattacgacggagatgcgacctttgctgttaagcaatctgttgacggcggcagctactcggaaattcaaaacagctctgcaaaagaggcagttatttcgggtgtgcagccaggatctgtatacaaattcgaagtaacagccgtcagtgatgatggcaaaagtacagcttccacatcttatgaggtgccaaaagctgaagacgatgaagataaaaaagaccagcaacaaacggatgatgaaaaacaagatgatgagaagactcaggatgatacacaaactgatgattctcaaaaagatgacggtcagacggatcaagatcagacagatgattcaacaaacgatcaagacaaaaaacaagacaatacgaacaccaatccgtccgacaacaataaccaagaccaatcaaacgataatgataacgacaacagtaacaaccaggatacgtcggatggtgattcgaactctggtaagaatgattcaacaggttctgacacgaataaaaataaaacagacacatctaataaaacacaaacaaactcatcatccattgaaaaaacaaattaaacaaaaaagccgtcacctttggggtgatggcttttttggtacacaataaaaaacctcccgttttaacaggaggttttatcgattcatcgcatgatatttataaaaatgctttttcatttcggtaatcagctcatcaagctgaataaagcaatggtattgggtcggcttaagaagaataaattccactcgttcagcccaattaatcggctttgcgggatatgatttctccctcagttcttgccaatcgagcgatttcaccggctcacctgctgtccaatgtaacgaagccagcaaacacacaatgccctttaacatttcgttttggtcacatctcgattttcgtgtttgaaagactgggagaagtgatgctttgatgtcatcccacacttcaaataaaagcggaacgtatttcccgctgtcctcccatggcaaatcgccttgtaattccgtgcagaaatcaaaatacacgggattggtctgcaaggttttcttcatatccgaggaactcttctggccaagactgcgcaagtattgctcataggaagccaacacttcttttgcttgcgtcatcgtttcaccagtccttttttatccctcttctgcccttctctgcacaaagaaagcagcggacactccgcacagcgcggagattgggctttacagtgatatctgccgaagaaaataagccggtgatgcgtaacggaccaatcttctttgggaaccttgcgcatcagcgtcttttcaacttccagaaccgagtccttccaccggcaaatgcccaatcgtttgctgactctctccacatgggtatctacggctatggccggcacgccaaacgcaacggataccactacgtttgcggtctttctcccgacccctggcagtttgacaagctcatcgcggtctctcggcacttctccgccgtaatcttcaataatcattttactcagcttttgaatatttttcgctttattacgatataaaccgattgatttaatatcctgctgaagctcttccagcggaacagccaaatagtcttccggccgtttatatttttggaataatgttttggtcactctgtttacaagtgcatctgtacattgcgcagataaagcaacagccaccactaattcaaaaggattggaatgaaccagttcacactccgcatgaggaaacatgtcacctatcttgtctaaacagaattcaatttgttttagatttaacacgattgtcaccttttcactttattgttcaagccaattgtaaaaaggaacctgccttttatactctttttgcggttcattctgctttgcttgtacacgccggaatttttggctgtgtatttttgcctgctccacagttttaagcccatttttcttccattcaaacaaaatccggtcaatgtagcggaaactgagttttcctgatagtacagcctcttttaacgcgtgtttgatcagttgtgcgtcatgctgatcctggtcctgccagatcgccagcgtttcacactccaaaggcgataacggtcttgcgaactcttcctcaaaaatggtataaaggcttttttgttccccttctgcttttctttcctgtgtttgattctgtgcaagctgaatatactcgtacagcttgccccataaaggctgaagagaatatttctcaaatttgatgccgttttgatcctcgcattcttcaataaacagaaagcctttttgaataaacatccgcaatctgtttgtacattcttcaacagaaattgacataccttcctgcagctgattcggtgtaggaaaatatgatcctttttctaaatgcattttaatttttaacagcagaataagttctgtttcattaagcccaagctgtttataatgcgtgagcagaagattggggatggttgatgttccctgctcctgcatatcaataaattgctgttttttcatcgtcacacctcttactgtaaaggattgtgattgcccctttactgtaaaaagtctcccttgcaggagactcttttttgtttcatttgaatgtattacggatacagacggtttaacagtcttgggaacggaatcgtttcacgaacgtgaggcgctccgctgatccaagctactgtccgctctaatccaaggccgaagccggaatgaggaactgatccatattttctaagttcagcataccatttataagcgtcagaatccagtccatgttctttaagacgcgattccaaaagttccatatcgtgaatccgttcagacccgccgatgatttctccatagccttccggcgcaatcaagtcagcgcaaagcacaacgtcctcacggtcagaagccggctgcatatagaacggttttaaggacgtcggatagcgagtgatgaataccggtttgtcataatgttcagcaatcgctgtttcatgaggcgctccgaaatcatctccccactcgatatcgtcaaagcctttttctttcagaaattcaatcgcttcatcatacgtaattcttgggaacggggctttgatttgctcaagttttgacgtgtctcttcccaatgtgtttagttcaattttgcaatttttaagaactgattgcacgatgaaagaaacgtaattttcctgtacttgaaggttttcttcaaattctacaaacgccatttccggttcgatcatccagaattcgattaagtgacgctttgttttagacttttccgctctgaatgtcggtccgaaagagaatacttttcctaaagccattgccgcagcttccatgtagagctgtccgctttgagacagatatgcatcttcatcaaagtactttgtcgcaaagagttctgttgttccttcaggtgcgcttccagtcaaaatcggcggatccacttttacgaagccttcgttattaaagaattcgtaagtcgcgcgaatgatttcattacggattttcatgatcgcatgctggcgctttgaacgcagccataaatgtctgtgatccatcaaaaattccgttccgtgttcttttggtgtaattggataatcggtcgcttcgtgaatgacttcaatatctgtcacagcaagttcatatccaagcggagaacgctcgtcctctttgacaatcccttttatatagagcgacgtttcctgcgtcactgatttagctgtttggaaaatgctttcttccacttccgcttttactacgacaccctgaataaaaccggtaccgtcccgaagctgtaaaaacgcaattttcccgcttgaacgcttattagcgacccaagctccgatcgttacttcctcacctacgtgcttgtacacttggttgattgttgttttcaacatatttccctccaaaacaagaaagacattcggaagctcattgccccgcgaactcttttatcatcactttattatacccgctcttaactaaccgggtcaatgcagataaaaagcggcttttctgtcagccgctttttgatctgttagctatgtttttctacaaaacgcttgattctttcaatggcttcttcaagaagatctaacgatgttgcataagaaagacggacattctcaggagagccaaatccggatcctggaacaatcgcaactttttcctcctcgagaagcgctttaacaaattcatctacatctttgaaaccgcaagattgagctgcctcttttgcatttgggaacaagtaaaaagcaccttccggcttcacgcagctgaaccctgggatttctatgagctttgcatagatcgtatttaatctatgttcaaatgcttctctcatttcttccaatggctcagaaggcccgttataagcagcaatcgctccgtattgtgcgattgatgtcgggtttgacgtgctgtggcttgcaaggttcgtcatcgctttaataatgtcttcagagcctgccgcataaccgattctccagcctgtcatgctgtgggacttcgatacgccgtttataatgaccgtttgctctttcagtctgtctgacagctgtgcaatggaaacatgtttctttccgccgtatgtaagtttttcataaatttcatctgacacaatcaagatatcatgttcaaggcacacttcaccgagcgcagatagttcttcttccgtatacatgacaccagtcgggttgcttggagagttaataacgattgcttttgttttttccgtaattgcatttttcagctgctcaggcgaaattttgaagtgattttcctcaagcccttctacataaacaggctttccgccagcgagtttcacctgctccgggtagcttacccagtaaggcgttggaataataacttcatcttcttcatccaaaatcacttggaaaagggtatacagagcatgtttggcaccagtgcagacaataatttgagacggtttgtattcaatattctggtcgcgtttaaatttctctgcaatgctgtttttcagttcagccaaaccaccggaaggcgtgtatttcgtatggccctcgttcatcgaacgcacagcggcatcaataatatgctgcggtgtattgaagtcaggctcgcctgctcctaagccgatgacatcatggcctgcggctttcagttctttcgctttcgctgtgattgccagtgtggttgatggtgttaatgcggatactctttttgccagtttcaacttgaactccccctaattcgtcttaaggcgtgatatttttgagaatctttccagttgtaaagtccacataacttaaactgtattgcccttctttgtctaagtacgtcacttcccaaagcaggacgtttccttctcttgccagatgaacctctttttgctttgaaaccagcccttcatcctttatgattttcgccgctttgtcttcagagattccctctttcgcttcttttgagagaatttttgcttttttatcagcaggaacccagacatataatgcagtgccttttttatccgttccctttacaacataatatttttcttttccgacaaatgtttcgacttgatcaacatgggcgagatcggtttcttttttagcttcagcagctgctgcttcgtgcccctcttccttttgtgccatggctgatttataaatgcttgccgagacaagaagtactgctaaaaaaataataccaaaaatgacggtaaatattaatgctttttttctcatcttctcacctacgtacgataaatggtaaaaacggcttggtttttgttttcttcatccagcgcaaggccgaacatcagattgtctcttttcagtgtacgattcaatgtgtccacaattttatacagatcatcagaatgctctacattaattgttgaaagaatttcgattttactttccattttttcatcctccagtttgaacaaatattgttagtcatactccatttcaggacacgccatactagtatcacagagcgggaaatccgcttttaaataaaacaccatcctactcccacaccgcaaaagccgctttatgcggcttttattctttttcccctgcaacataagcttcaagctcgctgtcagtcatttcggatactgaggttgtcggcaaggcatcaagaaacagccggccgtaaccagcggttttaatccgtctgtccaatataataatcgttcccttgtctcccgcagaacgcagcaagcgtccgattccttgcctgaaggtcagcacagcttccggtaatgacactgtttgaaacggattctttccttttttgcgggcaagctcacattttgcagcatgaagcgggtgatcaggggaccggaatgggagcctcacgatcattactgtcgtcagctcatcaccagggaaatcaacgccttcccaaaaatgatttgttccgagcaggatcgcctgattggatgttttaaaagtcttcatcagtttgccgggacttccgcctgtaatcccttgtgccaagagctgaatgccggaagcactcatgttatgcttaagctcctggtgaacctttttcagcatatcatgggatgtaaacagcacaaggattttaggctgtttttcctttgccatcagttcgatataacgggctgtatcctgtataaattcaggttgccctgtatcctgaattgatttcatttcttttggaatcatcacctgcatacgctcatcgtaagaaaagggtgactcaattctcattgtccgcgggaaaaagtcactcagtcccagtcgttcaatcataaattgaaaagaaccttcgactgtaagagttgcagatgtcagcaccacactatttttgcgcgcgaaaaactgatcagccagaagttcaccaggttcaagaggctgtgcgtaaatggccactgcatttttcgcaccctttgcatctatttcaatccaaaccgcttcatcgtcatcagagccaaagaagagcttctgcaacgtctgacagtaatgctgcaagcctttcatgcttctttggtattcatcggctaaaaagacggttttgctcttcatgcccttcaaatgtttttccataagggatgactgcgcctcaaaaagctgctgcaaatgtgtcagcatggaacaaagcctctccgcaccatctgttaagatcgaccagcttttatcctggctttctttgttcaccttaaacactagacggtttaagtcttctttaggttttcttcgtttgacaaaagaatgtacagagctaaagaaagcatcactttctgcttgaacgtgctgaagccactcttccaattcgaaaaatgaatcaaccggcaggctgtttcgctggaatagctgtctcatcttttttagaagtccctgctccttcagagtgccgattctgctcaatttcgtatgcaattctatgtacgtggctcttttccctaaatgttcgcttgccgcacgttcaaaatggtgtgcttcatcaataataaatgtgccgctttcgggaagcctttttttatggctgccttcatcggtcagcaaaagagaatgattggtgatcaccaaatcggaacgcatagcaatctgtttggcccgctcgtaaaaaccgatcacatgctcactgcgacttcttttataggagtcatcgtcataagccaatctgtcccacagcaattttccgcctgaaggcaaattcagttccgctacatctcctgtatttgtctctgtcagccaaacaagaagctgtgcctttgtcagtacggcatcataattatcatcttcttcatgaagcacctgctcaaatttatacaggcataaataatgcgattgcccttttaaaatcgccgctgttaccggaaatggaaacagatcttggacaatcggcaaatcctttgtgagaatctgctgctgtaaaagcgtcgaatacgtgctgattatgaccggcttttttgatttcttggcaaaaagcgcagccggaataagatagccaatcgtttttccgatgcctggaggagcttcaatcagcgcatgctcacgattggcaaacgcatcagccacctctctcatcatcatcatttggccgtctcttttttcatacccaggcattaactctgacagcgctttttcatttcccgcttcccagctttcgatctcaaatgagaagttctcgtcctcatttatacgaacatcgatagcttcaggttctctgacagaaaacgaagaaaagcgcgtatagcccggtatctcggtatgtctgttttcattaatgaacatatccaacaaatgcgtcagatcactgatgaaatgctgcgaaagccttcttaactgctttaatgtcggataaggaagctgccgcagcttttcaaggatttccaaaaaaataagccctgtcacttcagcatcgctgtcagcccggtgcggctgatcatgccgcagctgaagctcctcgcttaattccgtcagcttatacccttcaaatcccggaaaaacaatgcgtgagagctcgacagtatcaagcacttcacaatctgggagctgaaagcccgccttatgtagctcatacttgacaaatccaaggtcaaaatggatattgtgggcgacaaaataagcgccgtcaagcaattggaatacttcttcagcaactgcttcaaatggctgttcattctcgaccatttgattagagattccagtaagctgctcaataaaagcagggattgatttatttggattaatgtattttgaaaaccgctcagtaatttgtccattttcgattacaaccgctgcgatttgtatgattttatcgcctttcttcggcgaattccctgttgtctctacatctataacaacgaaccgttgcttattcattaaaatggacacctcaattcttgcatacgacaaaagtgtaacacgttttgtacggaaatggagcggcaaaaccgttttactctcaaaatcttaaaagaaaacccccgataaagggggcttttcttctacaaaattgtacgggctggttcgttccccagcatttgttcaattttgttttgatcattcagaacagccactttcggctcatggcttgccgcttcttgatcagacatcattttgtaggaaataataatgaccttatctccttcctgcacaaggcgtgcggctgcaccgtttaagcatatgacgccgcttccccgtttaccaggaataatatacgtttcaagacgtgctccattattattattcacaatttgtactttttcattaggaagcattcccacagcatcaatgagatcttcatcaattgtaatgcttcccacatagttcaggtttgcttccgtaacagttgccctgtgaagtttgccgctcatcattgttcgatacatattatattctctccatttctcgaatatcaataatgatattatctattaaacgcgcttttgaaaaagcaactgcaacagcgagaatcatctttccagcaatttcattcacaggctcgagttccggataggaataaagctctacatagtctatggttccgctagtcgtttcaatgatatcttttgcagcttttatcaccgcttcaggatctctttcaccggcttggacaagttccgcacttgtttgaagggcccgatacagcttaggcgcttcttttctttcctcagctgttaagtatacattgcgagagcttttggctaagccgtcttcctctctgaccgtatcgacaggaaccaattcaatatccatgaagaagtcgctgattaacccatcaacaacagctacctgctgcgcatcttttaaaccgaaataggcacgagtcggcttgactagattgaaaagcttcgtcagtacgatcgcgaccccgtcaaaatgtccttctcttgagcgcccgcataacacgtctgtgcgtctttctacatgaatcgtgacattcttttcaccgggatacatatcatgagcatctggcgtaaaaagaatatcgactccggcgttttctgcaagagctgcatcccgctcaatatcgcgcggatatgcttcaaaatcttcattagggccgaattgtgcaggattcacaaaaatactcataataacggcgtcgttttcttgtcttgctttgtctgctaaggttaaatgcccctcatgcagaaaccccatcgtcggaacaaatccgattgacttgccctctgaatggtattgttttatggcttctttcagctgtgaaatatcagtaatctgtctcatcttattttcccccgtacaagccgtcaagcactgtctggttcatttgaaaggaatgcttttgttcagggaaagcacgatgtcttacatcctgaacatatccgctgattgctgtttcgatggtttcatcaatgcgcgtatattgctttacaaatttaggtgttctctcaacaccgtggccgataatatcatgataaacgagaacttgtccgtccgctttcacaccagccccgattccaatgaccggtatgcttagcgtctcggcaattttggctgtgagttctgccggcacacattccagcacaagcatcatagctcctgcttcttcgcattttatactgtcttctattaattttttggcgctttgttcgtctttgccctgtactttatagccgcccagtacgccgactgactgcggtgtcaaacctaagtgactgactactggaatgcctccaagcgtcaatgcgcgaatggattcaaacacgccttctccgccctcaagcttcagtgcgtcagctccgctttcctgaacgatagccgctgcatttttcagcgtatcttccttagacaggtgataagacataaacggcatatctgtcacaataaaggtattcggcgcaccccttttaacggcttttgtatgatggatcatgtccgcaactgtcacaccgacagttgaatcaaggccgaggacgaccattccaagtgaatcaccgactaaaatcatgtcaactcccgcttgttcagcaagtttagctgccggataatcataagcggtcagcatgacaatcggttcttcagactccttcatttttagaaaatccagttttgttttcatgttttctcctcctcatgtttagaggagatgatctgccgttttcttctgcaagccaaaaaaccttccgttacaacgagaaggattcttcactttctaaagttcggcgagtttcatccctctgtcccagtccttttttggatcaaggcagactgctgcaatgtctatctattttaataataggtgcagttcgcaggcgatactgcccaatggaagtataccaaaatcaacgggcttgtaccaacacattagcccaattcgatatcggcagaatagatttttttaatgccttcgttcgtttctaaaagcagaacgccttcatcatctatacctaacgccttaccgtaaaaggttccgtttaacgttctggctctcatattagtgccaataccgagcgcatagctttcccataaaagcttaatcggcgtaaatccgtgcgtcatataatcccggtaccgtttctcaaagcatagtaaaatatgctggatgacgccggcccgatcaattttttccccagcagcttggctgaggcttgtcgcgatgtccttcaattcatctggaaaatcattaggctgctggttaacgttaatgccgatcccaatgatcactgaacgtacgcggtcttcttcagcctgcatttccgttaggataccgactgttttttttccgttaatcaaaatatcatttggccatttaatatccgtttggatgcctgctgcctcttctattccctgcacaacagctactgcagcaagcagagtcagctgcggtgttttttggagcggaatgtcaggccgcaaaatcaggctcatccaaacaccgtttccttcttgagaatgccataccctagacattcggccccttccggctgtttgtttgtcagccaccacaagggtgccttccggtgcgttattattcgcgagctcatgagccgttttttgcgtgcttgaaagaacgtcatggtaaataagatgctggcccatcacttccgtttttaatccaaaacgaatttcgctttcactgagttttccgggttttttgatgagccgatatccttttcttctaacggcttctacttcataaccctctttccgaagctcttcaatatgcttccacacagcagttcttgaacagccgagagcatcactgattttttggccggaaataaattcattgccggcctgagaaaataattcaataaggtcttttcttaatgttgaccgcatgtcttcagccactcctctatgtgtttcttttgattggagagcttccctgtcacaacagcctgctcgatccactgtaattcttctgacacccattttccggccggccggtttcgaagcgcaagcaagtccttacccgtgatatcaagatccttaaggcttttgatcggcaggttttgataagcgtactgaatgtccttcagtttcttttcatccagtttttcgttttgccgaagctgcgatattttggccgctgagagcagtgcttttttcccagctctgtacattgtcattgcgtcaaggctctggccaaacgtatcggcaatgtgaatggcttccttgatcacttttcccgggagcttccaggctttcaggaaaaggggcgcgtctttcaaaactatgccaaggttaattaaaagagcagcccaaagctcctcacgggatgttaaagagaagaatggaaactcactcgttgaaatcaggttttctcgtttatgataaaaaccaggaagctcttcatacaatctcgtttgaatgagtgtttgaagcgcctggcgagaagctcttccctgcagcaatttctcaaactctatagtttttcgttcgactgaaacatgggagaggagtgatttttctttcgcaatggcttcttctgtttccggtgaaagcgtaaagccaagctggctcataaagcgtacggctctcagcatacgaagcgcatcctcttgaaatctatcctcaggctttccaacggttcgaatcactttctgatcaatatctttcttgccgccaaaataatcaagcaccttcccgtccgctgtcatggccatcgcattgatcgttaaatctctgcgttttagatcctcttctaatgatgagataaattgcacttctgacggtcttctgaaatcaacataatcagattcagtccggaatgtcgtgacttcataggtttcatcctcccagagcacaataatggtcccgtgctctttgcctacatcaacagtccgctgaaacagccgttctacttgatcaggtgccgcatctgtcgcgatatcgacatctccgatcgttcgtttcatatagctgtcacgaactgcgcccccgacaaaataagcctgatggcccgcttcgattaagatgcggagcacgggaagtgctttgataaaaactttttccatgtgatcactccggttctgctaaatcggcataaatctgttcatactggctgacaatttttttagaagaaaattcattttcaagcatctctattgccgcctttgtaaaacgattgcttagctgttcatcttctaaaatgctcatcgcgcgggctgttgcggccgtaacatcaccgacatccaccaaaaatccgctcacattgttttttataacctcagggataccgccaatgtttgttccaatacaaggcactccgcaagccatcgcttcaagcaggacaaggccaaagctttctttttcagatagcagcagcttcaaatcgctaatagaataaagatcttcaacacggtcttgatttccaagcattaagacttggtcttccaagccatattttctgataagctcgcaggctgtcgatttctccggaccgtctccgactaaaagcagcttcgctttcgttttgccagcgatattgcggaacacacggatgacatcctgcacgcgtttaacttttctgaagttggacacatggatgacgactttttcatctggtaaaattccatgtttctctttaattgccgctgtgtttttcttcagatacacgcgctcgtctataaagttataaatcgtttcaatttttttctccggtttaattaaatcgtatgtttcagccgcaagcgctgaggagacggccgtcaccctgtctgatgactcaatagcaaaacggatcagatcttttagagacggatcataacctaacaccgtgatatccgtgccatgcaaagtggtaacaatgccgatattgcgtttcagcatttgttttgcaagataggcgcaaacggcatgcgggagagcatagtgagcatggataatgtctaaattctcccgttccgccacctcagcgattttgcttgccaatgtcaaatcatacggaggatacttaaaaacagcatattgattaacctcaacttcatgaaaatgaatattgggatgatatgtattcagtctaaacggaatgcttgatgtgatgaaatggatttcatgtcccttttcagcaagctgcttccccagttctgtcgcaatgatacctgagcctccaacgctcggatagcatgtgattcctatttttagttttctcattgttcgcccccaagcacatcatgatcaagcatcagcatccgtttggaaaagaaaccttcggcatactccacgcccgcttctttaccgtaaagcttttctctcgcttcaacgatttcaatatacccattcgtcagaggagtagaaacggaatcctttgacgggataaactggcttttgtaggcgttgaggctttgtttctttgcctctattgtatccgagatatcaataacaaaatccggctgatgaaaaccatttatcatataatagtaaaccttgctgactttatgcgccggaaggcttttttcgtctttatatttatggattccggcggaaaagatcgcttcttccaccagtgcagccgcattgccgtgatccggatggcgatcctttttatacggcataaaaaccgcttttggccgacagattctgatgacagtgacaattgaccgaattgcctgatcactcattattaggccgcggtctggaagcgttagctgaattcttttatctgcgcctaatatgcgggctgcttcagctgcttcttctttacgcaaactgaccgtaccgttagaagagagttccgcttctgtcaaatcgcatatcattacttttttttcctgtttgacaaacttcgctattgtgccgcccattccgatctcgacatcatcactgtgggcgccaaaagcaagaacgtcagcattatacattcggctcttctccccgaagaaggtcacggaattcgaaaacaccttcatcaagtgtgcgcacaagaatttccgcagtacccatatttgtggcgagcggaatggaatacacatcacataaacggattaatgccgagacatccggttcatgcggctgcgcggtcagcgggtcgcgcaaaaaaatgacaagatcgagtgcattggcagcgatcagtgcaccgatttgctggtctccccctaaagggccggattgaaaacgttcaatttgaagacctgtcgcctcatgaattttcaaccctgtggttccggttgcgtatagatcatgattctttaaaatatcccgataggcagtcgtaaattgaaccatatcctgttttttcttgtcatgcgcgatcaaagcaattttcattgtttatccccccgtctaatcaatgatattttctaaaccatacacaagctgatcaatcttcatgacttgttcgactgacagtttaacgcctgacatgaaagaagcacggttataagaatcatggcgtatctgaagcgtttggccatccatgccgaacatgacctcctgatgcgcgatcagtcccggaagacggacgctgtgcaagcgaataccgttttgctccgctcctcttgctcctgggagaatttctttttcatccggatgtccttgctgcttttctttacggacttctgaaatcatttccgctgttttaagcgcagttccgcttggtgcgtcaagcttctggtcatgatgaagctcaataatctcaacatcctcaaaatagttggcagccatttttgaaaatttcatcatcagtatcgcaccgagcgcaaaatttggcgcgatgatggctccgatccctttttcttctgttaaagatgtgagctcttttaaatcagcttctgagaaaccggttgttccgacaactggacggactccgtgctctaatgcaatttttgtatgtacttttccgatttcgggcgttgttaaatcaatcaagacatccggttgtgtttctgtaaaacaggcatggatatctgtgtaaatgaaagcatctgactcaacaggcatcacatcagataatttttgctgatcgtatgtatggtctatggcccctacaaggtcaaaatgtggtgttcgttctgccaatttaacagcttcctgccccattcttccacgcggtcccgcaatgactaatttaattgtttcgtttgacatcttgatctcctctactttccttcttcttttctggtccagcgatctttatctcttgtattaaatttatgcatgactcggtcgtgagcttcctctaaagagatatcaagagagttggctaaacaaaccaatacaaatagcacatcgcctatttcctcttccatgcttttatcatcttcagtcgctttttttggtttttctccataacggtgattcacttctctggcaagctcgcccagttcttcagtcagcctcgccatcatggccagcgggctaaaatatccttctttaaattggcctatgtaacggtctacttcagcctgtatgtctttcattgttttatcactcactgaacgaaacctcctatcatcctcttacatgttagctaattcagatacgtttgacaaatgtttaagcacgtttgctgttttctttttcatccactataatataaacgctatctaatggaaggaaaaggggttttgtgtgatgcttggagaaattagattaaaaaacatattttttattttaatcggagcggcaattttttcatttggcttggttcatttcaatatgcagaacaatctggctgagggcggttttacaggtattacacttttgctttatgcccttttccacatcagcccctctatatcgaacctggtgttgaacattccgattttttttattggctggcgtttgctcggcaggacaatgtttgtttatacccttgtcggcactgtagccttgtctttgttcctcagcatctttcagcgatatgaaatccatatgccccttcagcacgacttagcgctcgccgctttatttgccggcgtattcatcggagccggactgggtattatttttaagttcggcggtacgacaggcggtgttgatatcatcgcacgtttagtgaataagtattttgggattccgatgggcagaacgatgtttgctttcgatgcctgcgtcatcattttgtctttgcttacttatctctcctataaagaagcgatgtatacgctggtagctgtatttgtagcggcaagattaatcgattttattcaggaaggcggatacgctgctaaaggcgctacgatcatctcttcgaaaaacgacctgattcagaaaaagattcttgaagaaatggaacggggcgtcaccattttgaaaggacaaggttcctacacaaaagaggatatagatgtactttattgtgtggtgccgaaaaatgaattggtgatgctgaaaagcgtgattaactccattgatccccatgcctttgtagcggtaagcgatgttcacgatgtgctcggagaaggatttacgcttgatgaaaataaaaatccgcttccgcgctgacatgtaatagaaaaaaggcggctgaccgccgcccctcatccttatttagggtagtccctttttttcagcttgtttttttccgccttgtactttctgtaaccgacataggtaagagcagtaatgatgatactgccggttgtaatgatcacccagagtaaagacggatcggcatcatcctcctccaccctgtcaaacacatttttcaggtcatgctgaagaagggaaagccgttcaagcttcgtgctctctgtcatttgctgaaattcctcttgctcaataacatctatatgttttccgactgtttcaagctgatcctctgatacatcgattgtaagactggggtaaatcaagtcatataaactgataaattcattccatttttcatgaaagcttgtgcttccattcttttggacatctcgcttcagttcagtaaaagcttccataatcggtttttccagtgagccccaaagcgggtcagaccgattgtcaaccgcatccatcagcattctgaactgcgcggctgctctgagtttttgtgtgtctgatgtatcagcttgctttaaactccgaaccatatcattatagcccaatgtgatttgacgaatttgggctcccgttagcatggggtcttgctgttttttctcagcggattttaatgttttttcaaaatactccaagacttgaagcgcctcttcatatttcgcctgtcgggtcatttgaaagactgtatcggataaatcattcaattcctcgaggcttccccgctctgcagccttggcatttccattataaaaaataagtgcaatcaacaaacagatcgtcagctttcgtttcatgcaggtccctcccactctctctccttacagaatatgaagaaagggacaaggatagaccaacattgtctttacatcagctcaagcttcgtttgcttttttgagaccacaagaaagtaagcaagcgcgattgaaaagatacttagccaaaatgttccgtatcctatttcagtcatataatcagaaagcatagagtattgcggcatcatatcaaacaagtagtcaatgacatcgttatgcagtgtccagactgcagcaattgcaagatgccaaaatgaaaaacgaaaatacggactgtataatacgccttgaactgccattgcaaaatgcgaagcaattagcatgtagccctcccacggcaagtcaccagttactgcaagcacaagaaaattcatagccaccgcccataggccatactttacgagggtaactagcgcaagcgcctctaaaagcggagcattccgtttcatgagaaaggcaagcagcacaaacagaaagaaaaacgttgctgtcggactgtccggaacaaaaatcaggaaacgggccggtgtctccaaaagctgcggcaagtaccaatagtagccgtaaaccgttcccagaaaattaatggctaagacaagaataagcatcggccgctgccctaatacatattgaaaccatttcacatcgaatcaactctcagtctgtaaaaataatatgtccatataaaaaagctgacgccgggtcagcttttgataataaaagtatatccttccatttgacaattcacaatacgttattttgcggttgtttcagaaataaattttgcaagttcttcgagctgcttatcatttcctttgaacacacccgccggcattttgcctttcccttctacagcgatttttttgatttcatccggtttcagcccgctgtcaaccaatgaaggcccggccgctcctccctgaaggttatccccatggcaagaaatacagccctgttccttaaaaaccttatatccttctgcattggtgtcaatgtcggcttcttttgtaattttcccctgttcttctgccttggcccagtcatgagtagcaactgactgccacgtcaaaaatacagcagcggaaatggccagaagcatcataccgacagcgaccggacgcttccacggccttctttctgtccctctgtctaggaatggagccaaaagcagggccccaaaagcgagacctggcataatcatggcgccgaccactgtaaagcttccggcggcgtattcatacttcaacagctggtataagaaaagaaaataccaatccggcagcggaatataaccagtatcagtcgggtccgccatccgctctaaaggcggctgatgcacaatcgtcaaaacgagaaaaccgatgagaaagacagctccaaccatccattcctttaacaagaaatttggccagaaagcctctgttttacccggatactccgaataatccttcggtatattcggctttttttcagccggtatccttgagtcgcctacaaatttcatccctttgccccggtgcatgtcatcccctcccttttattcgcagatcaagagtttaaagcggtcctgaaatcccctgcttccggatcataataaaatgtgcagccatcagcccgaacaatgcggcaggaagaaaaaatacatggatcgcaaaaaacctagtcagcgtttgggcgcctacaatatccggatgccctgcaaggagcgttttaacttgcgttccgatcaaaggcgtggcttcggcgatctgcagtccgacttttgttgcaaacagagccttcatatcccaaggaagcaagtagcctgtaaagccaagaccgagcataacaaaaaagatcagcacaccgacaatccagttcagctcgcgcggttttttatacgcgccttggaaaaagaccctcagcgtatgtaaaaacatcatcacaatgaccaggctcgcaccccagtggtgcatccccctgacaatctggccgaatgccacttcattttgcaaataatataccgattcccaggcatttttgatatcaggcacataatacatcgttaaaaacattccagataatacttggataacggttacaaaaaacgtcagtcccccaaagcaatacacaaacgcagagaaatgatgggcgggattcacatgttccggtacttcgtgatcggcaatatccctccacatcggtgtaatatcaagccgctcgtctacccagtcataaattttgttcagcatgtcacccttcccccttaggctttgcttttccaagatacaggaagccgtcttttacttcttgctcataatgatcaagaggcgcaagcggcggcgtgccagggacattggtgccgtccttttcatagagtccgtaatggcatggacaaaagaatttattcgggtttttaggatcactattccagttcaccgtacaccctaaatgcttacaaattggcgaaagtgctacaatttcatccccgtttttgaagacccaggctgatcttgactcttctgactcataccaggcatcgacttgattaattttaaaatcaaagcgctgcggctcttttgtcaactcatcaacgctgacaacctgaaccatatcctgcttccctgtcgattttaataccgggtcgagtgcgaagcgaaccataggcatgagcatactagccgccataaaacctcctacgcctgtgagcgtataattcaaaaattgacgtctggatatatcatgttttccgcccatctcttctcccccctctaagtcacccctgcaaactgactaaaatagaaaatattgcaataactctagacaccctcataatatatgaatctctcagcaaggtcaatatagccaaaatattgtttataaggaaatgtaagtgtttttataaagtgctccataactgtaacaaaacgttcaaaatttcagcagtgcgttcatccaatatttttctttttaaagagtcatttaaatgctctaatggaacagacgatgtaacaatcattttgcctaacgcatcctcagctctccaactttcgtcagatgtgagcaggacaacatgcggaaattccgttatcagctcttcccgcaaatccttaagcccttgaacggttatttcatttctatcaacatatgtataaggcggaagtaaatatacccgtccctttaactgcctttcaagttcttctgagagaagctgcgtaaactcgcctttctccgccgccattttaaaatggttattaacccttatgttaattaatggtatgacagcggtatcaatgtaatccttagcttgtaaatagtccttggcatcagtgattctccacctcatcgttctccccctttacggcaacaagccttgcaattcactgcaaggctggtcatattatgtgagctgatttaattggcgcgataattgttcaaatgcctctttatcatgacgatctaacgcgtcgtcaatgtcttttaataatttttctctttggaatgtggaaatagcgtgctctaaaatctgttccgccaatccctgatcttttttattctcaaaaaggtttttcggaatatgcgggttggactccagcaccgccgcatattcaggtgagctgtaagccgaacggaaattaagctggataaacaaatcctgctgtttatttaatctaatatcatgaaaagatttttccgcgtcggtagtcatgacattctctttatagaaccggaacggaacttcttcaacacaatgtgttgacattataatgcctctcgggcaaaattcagcctgctccacaaaatgaaccttctccatgagagaatcatggctcattaagtagttcaagatccaaacgcactctcggcgctttaactgataatggtttaaaaaccaacggataaaatcttttttctcattgacagaaacaggggtctgcatgtaattccctcctctatcgttcgtataatctatatacttatatgttccacatgaatggttaatattcctgcttatctagaaaattcatcctcgattcgcaaaatcgtttcttcaagctcttcattggctccgtccatttcaagaacctttttcaaaagcggcagcgcttctttttgaagaccttcttctaataggaagcttgcgtattcatataagaaatctctatcctcccggtaatgaagataggcagcctcaaaggattgttttgcttcctcgtattgctctaattcagtatatgcgcttgcaagataccaattgtatttaggatcttcttcaccgtagcttcgaacctcttgaataagatcaatgatctgatcataatcctcttctttgtgatacacggcaagaagtgtatgaagcgcctcgacaaagcccggatcaagcgcaagcgcctcctgaagcagcttcttcccctcttctgacttcccgattttcaaggccattttggcggcataaaggaaaagttctttgttatattcatcatatctgatcccctcttttgccgtttttaatgcctcttcatacattccttcagcttcatagcttttcgagagcggcatataaagtgaagtataagatggatcaagctcctttaaatcagacagctgcttaatagctgttttcacaagccccgcctgtaaggctgtaaaaccatagccgaaaatcgtattaggatcaggattctcatcgacagctttctcataccatggaatggcatcctcaaattcacctgaggcacttaacgattctgccagtctttgatggacattaacgcccccgatctcactctgctcctcagccgttgttttaaaatattgaaccgcttttgcataggctccctgagcaaagtaaagttctcccagtgcaaaatcaataacaggttcattgtccagaatggactttgcctggaaaagcttttgttcactgacttcgaataacccctgcatctgataaagatccgccataagcagcaaactttccggatatgatggatctgtttccggaatagtctccagcacagcgagggctttttcttcttcgtcaatatctattaaaagttcagcgtagaaattcgtcagttctgtttcatttggatataaatcatgtagatcactaatcagtgaaatggctttttctacatcgccccactcgtaataaagctgggctgcaatggctttatcttcatcatgcagctgtttttcagccttcgagagcgtgttgaggcctttttctgtttcacctgcttcaactaattttatggcttcttgaatcaatgtattcaaatcggaccggtcctttcttttcctatacaacatcaaccatacaaaaaaagctttatttgttcgggttaatcttatcataattcagacgaatgcccccggcaaataagatgcttctgtacggaagggaattattgagtcttattagtttaccaaaagatcttgagatagaaaatgaaaaaaggaagatcgccctctgtacagtaaagcagctctttgacctgccggcttgtaagtaaagcacatccccccttttcgtttttctatccgttctataagacaagctatgttttttcgcctcgaattatgatctgcataaaaaatcctgaagtaaaacttcaggattttttcgaaagcttatttaaatgctcgaagaaggttggataagaaacgtgaatggcatccgtgtgctcgatttcaatcggctcctccgttatacaggaagcaataccaagcatcattccgattcgatgatctccgtggctggacactgcagcgccgcctttcaacgtttgtttgccataaaccttcattccatctgctgtcggttcaatttcagcacccagcttgcgaagctcagaaacaacagtatcaatacggtttgtttctttcacttttagctctgccgcgtccttaataacggtggttccttccgcctgagtcgcaagaagcgcgatgatagggatctcatcaattaaacgcggaatgatatctcctccgatttcaactgcctttagagatgacgtttctataatcaaatctccataaggctctgcaccgctatcagcagatggtttgatttcaagttttgcccccatgttttgaaggacatcaataatacctgtccgagtcggatttaaacctacgtttttcaatacaattctgctgtttggaaccatcgcgccagcagcaaggaaaaacgcggctgaagaaatgtctccaggaacaaaaatatcagcagctgtcagtttctggccaccagcaatggaaacactcgtttgatcttcagaaagcttaacgccaaaagcagaaagcatccgctcagtgtggtcccgagatttatggggctctgttacagttgttgtgccctcagcctgtaatccggccagcaaaacagcagatttaatttgcgcgcttgcaacaggtgatacataatcaattccttttaatgaagcgccgctcactgacagcggtgtaaactctccgccggctctgccgtcgattttagcccccatttttttcaaaggctcagtcacacgcttcattgggcgtttcgcaatgctctcatctccggctaccgcgctgtaaaaaggacggcccgccaatattccgagcatcaggcgaatcgttgtacctgaatttccgacatctaaaaggctttctggctctttcagggcatcgattccttttccgtgaatcacgacatcgctgctgctttgctcaatgtgaacacccatttttctaaagcaatcgatcgtgctcagacaatctgctcccggcagaaagtttttaactgttgttgtgcctgccgctagcgcgccaaacataacagagcggtgagaaatggatttatcaccgggaatatgtatttctccatgtaaggtctgcaccttatctcgtttcattttttccacctcaatcagcataaaaagtttcatattccgcccgggcttcaatgcattgttctgcccttttgcggtcgtcatcagactgaaaactgatccttaaaatcccgttaatatcctctcgtgtttcgataatgcggatattcgtgatactgatgcgctccgcagctaagatcgctgttatctcggatattacacccggatgatcgggtacatccacatataaatcataaaatgcaggtatcgctcccttctgccgaagcggcagcccgtcgcgataatccttggctgttttaaaataacgaaatagattttccgcatcttcttgttctacatatgtacggatcttgtcaatttcacgaatccactcatcaaaacggtctaagattttatctttattatgtaataaaatatcccgccacattgccgggctgcttgatgcaatccttgtaatatctctgaacccgccggcagcaaaacgcttaacaagcggatacaggttttccgaatgatgggtttggtgaacaaggctagctgctacaatatgcggaaaatgactgattacgcttgtaacgccatcatgctcctctggcgacatttccacaaaatgggcattcgtccccttcagcaggttttttaactgttccacagcttgtttgtccgttttctggcctggcgttaaaatataaaatgcattttcaaacaggaactccttcgcagcggccactcctgatttatgtgaacccgccatcggatgccctccgacaaattgatagcggctaggcagcacttgatcagcgtaatcaaccactttttgctttgtgcttcctacatccgtaatcaaaagctcatgttcaattcctgaatgagccagctcttcaagcataaccagtgtttgttcaacaggtgtcgcaatgattactgtagctgcctctttcacaccgctaataaacgaatcagcacgatcgtctatcacgcctaattttaatgccgctaccgcctgttcatcagagatgtcgattccgataatccgtttgccgggatgattttttttgatggctagggcaatcgaaccgcctatcaatccgagaccggcgagcaatattgtatctttcatttgattcatacgtcatcacctggtttatagactaaagaggtgatatttgatcacctcttataaaatttcagctaaaatggcaagtatttcttcattttgctcttttgttccgatcgtaatccggagtgatgtcgggaaacctaatgcgtttcctgaccggacgatatagcctttttccagcagagcctgaaacagttcatcagcaggacgtttaaagtcaattaacacaaaatttgtctgtgaagggtagcactttaaaccatgagttttcgcaaaatcataatactgctgaaggcctgcattattttgctcgacacaggaagcaataaacgcttgatcatcaagtgctgcaatcgccgcagcctggcccagacggctggtattaaacggctctctcgccggctcaatctggcgaatcaggttctcgtcagcaattccgtatccgactctgagcgctgccagaccgtatgcctttgaaaatgtgcgcaaaatcatcaaattggaatacttgcttaagagcggcacggtttccgggtaatcctctgctgttacatattcataatatgcttcgtcaagaacgacaaggacacgagaaggaacgcgctccagaaatgcgagtaattctccttcagatgtataagtgccagtcggattattcgggctgcatatccaaacgacttgtgtctgttcgtcgatggcttctaacatggcgtctaaatcatgtgagccgtcgggacgaagtgcaatttcacgtacttcagcaccttcaataaccgcattatgtttatattgcggaaaagtgggggcagcagtaaccgtgtttgttttatcgtttaaaaatgcccggcagatgatctgtatgatttcatcagaaccgttgccgaaaataagtgatgtttcgctgacattgaggtgcttactgagccttgtccgcaaagcggcgctatacccgtccgggtaaagggctagctgttgaatctcatgatgaagcgcctcttttgcagcctctgaacagccgtaaggattctcgtttgaagcaagcttcacaactttatccaagccatattctgatttcactgcttcaatcggctttccaggctgataaggcttcagctgttttaaatgttctttgatacgcaaatcagtcacctcattttaaactgtacaagccgctaaacgccattgcataatcctcaaactcctgcagcgcctgatttctcgtttcagcgctgatgagccggtcctttaattcttctatttttctgacgagcgcacttcccactacgacaccgtcactaatttcattcatctttatgacctgttcacggtttgatataccgaaccctacagcaaccggaacagtgctgagattcttcacagtacgaatgaacgggtacacggatgaattgaactcattgcggacaccggtcacacccagagaagatacacagtagacgaacccctcggcttgttcaataatggttttcaaacggctttcgcttgtcggcgcaactaaagaaatatacgtcacctcatggcttttacattcctcttgaaggctgttgctttcttctaatggcagatccggaacaagcagaccgtcaatatgattttcccgcagtaaagcgaaaaagtattctttgttcaattgtaacacaggattataatacgtaaagaggataatcggaatattcactccgttttttttcatttctccgcctaattcgattgcctttacgatattcattccttgatcaagcgcccgctttgaagcccgctggatcaccggaccgtctgcaagcgggtcagagtatgcaacaccaagctccaatgctgtggcgcctgctttttggagtgacttcgccagttcaatcgaaacctcaggaactggatcgcccgccgtaataaacgggataaacaatttttctgatggttgaagatccaatttaaacatgggctttcacctcttcttccaatacattcattaatgtgttgacatccttgtctccccggcctgataaacagacgagaatgagttgaccgcgatccattcctttggcgagtttgaatgctttcgctaacgcatgggcagattcgattgccggcaaaatcccctctttttctgacaaaagctttaatgcatccaccgcttcttcatcggttatactgtcataagtgacacggccgcttttatgcaaatatgcatgctccggaccgattccaggatagtcgagaccggctgaaatagagtagggctcaataatttgcccgaactcatcctgaatgagataagtcaatgaaccgtgaataacccctacggttcctttcgaaatagtggcggcatgaagaggtgtatcaattccttttcctgctgcttcagcgccgatcagttcaacatcttcatttaaaaatgcctgaaacatacccatcgcattgcttcctccgcctacacatgccactactttatcaggcatagtgccttcaatacgtttcaactgatccttcgcttcctctccgatcattttttgaaattcacggaccacttgcggataaggatgcgggccgacaactgatccaatcatataaaagtgatcctcacaatgctgaacccagtaccggatcgcctcatttgtggcatccttcaatgttccgtttccgcttgttacaggcactacctccgctccaagaagcttcatgcggaaaacgttcagagactggcgggcaacatcctcttcacccataaacacagtacaggaaaagccgaatttggctgcaactgttgcagcggcaacaccatgctggccggcaccggtttcagcaatgattttcgttttgcccatttttttagcaagcagcgcttgacctagcgcattattgattttatgagaacctgtatggtttaaatcttctcgtttcaaatagattttcgcgccgcctaagtattcagtgactcgatcagcgtatgttaatgcagtcgggcgtccggaatagtcctttaacagcttataatactcttcacgaaaagcgggatcatccttgatttgtttaaatgctgtttgtatttcatctaacggctgcatgagtgtttccggaacaaactttccgccaaaatcaccgtatctgcctatttcattcggatatggatacatatcggttcatcctttcttctaaaagcctcatcagattctgatctttttgtccgtttttttcaattccgctggcaaggtcaattccttctggctgccatttcaataggcgtgtgatgctatccggattcacgccgccagcgataaagcagcgtttaccaatagccgcctgctgatattccggcacacattcccaagaaaatgcaacaccagttccgcctctagacccttttacagatgaatcaatcacaaagccgtcaacattatctttaaagcgggctatttcttgagttgtgttatcttgatggtgaagcgccttccatatttcacagcctgtcagcttgcgaagagcagcagcatccgccggtttttcatcaccgtgaagctgaatgacgtcgagcttcaagctcttggcaatacgtgacatcgtctctattgattcattaacaaaaacacctgcaacctgtttttcgacacgaacttggttcagccattttttcacatcttccggagatacttttcgtttgctttcagcaaaaataaatcctaggtaatcagcctgtgattccgccgcaagctgcaaatcctttagtgaccgaataccgcaatattttaatgccggtttcttcacaacctcactccctaaacaaagcatggattgctttacgctgagaagtttgtctcatcaatgattcaccgataagtacagctcgcgccccatgttcattgacaaatgttaaatgttctaaagaaccgattccgctttcgctgacaagcaaggattctttcggaacgagagatgcgatttgttctgtctgctttacagatgtttcaaacgtttttaggtttcgattatttacgccgagaatgtcgggtgtgaacactttcaatatttgttctagcgttgatgcatcatgaacctccactaacacgtccatccccttttcacctgcttcaagatataattcatgaaggtgtaagggatcaagcacctcgccgattaacaatatggcatccgctccgattcttcttgattcctctacttgaagagaatcaataataaaatcttttctaagtacaggaatcgaaacagcacgctttacgtctgataaatagctgttttccccttgaaaaaacggggtgtctgttaaaacggaaatcgcatctgccttcgcagcctcatagtcttttgcaatctgcacaggtacaaaatcctctttaataagcccttttgacggcgatgctttcttcacttcggcaatcaacccgataaaccgattcgggcttgccagcgcctccttaaatgaacgtttctcgaaaggctgctctaccggcagaaccagtgttttcacttcttctttcttttgtttgatgattttttcaagcatagatctcttcctctttctgctttagtcgttcaagctgcgcggcagcgcctccgcttgtaatcgtctctaacgccagctccgttccttccttcagtgaggcggtaattcccgccgtgtaaatcgcagcacccgcattaaaagccgtaatagataaagcggaactgctgcttttattttcaaaaatattctgaatgagataagcgctctctttcggagactgcacctgtaaatcttcaagtctgccatttgtgaaaccgaaatcttcgggtgaaacggtatactcccggcgctctccgtcctttaattcaatcacgtcggtcggtgctgtaattgaaagctcatctaaaccgtcacggcttgatacaaacataacgtgcttcggctgaaacgtctccagtgcgcttgccatcagtccagctttttcaacagaatagaccccaatcacctgacgcttcgcctgtaaaggattgctgagcggcccaagcagattaaataccgttctgaaacctagctcttttctagtacctgctacatgtttcatagacgaatggtaaagcggcgcaaaaagaaatcccatgttgtttgtttcaatgctgcttttgaccttttcgggagtggtttgaatagaaacctctagctcctctaaaacatcagcgcttccgcttttagaagagacagagcgattgccatgcttagcgattttcgcaccagctgccgaggcaacaattgccgaggccgttgagatattaaaagtggaaataccgtctccccctgttccgcatgtatcaacaatatcaggaagtccatcgactgtaagagcgtgtgcccgcattgccttcacaaaacccgcaagctcttctggcgtctccccccgatgagcaagaattgacaatatcccccccatttcagaaggagtcatttccgctgccatcatcatattcatcagcgtttcagcctcaccggcagtaagggtttttccgtcaacgcacaattgtagaaatctgttcatcagctttatcctccttgctatgaaacatgtcttctgcaatatgaatcgttttcagcagcgcaccggctttattacagctttcttcgtattcggcttccggaacagaatcagcaacaatgccagcacctgcctgtatcgatgcaacaccgttctttacactcatcgtgcgaatcgtaatacaagagtcgatattcccgtcaaacccaatgtaggcaatacaccctccgtatgtctctctcggtgttggctcgagttcttgcaaaagctgcatggcacggattttgggtgcgcctgttaaagtccccgccgggaaagcagacatcagtgcatcgacaggatgaaccccttttttcaatcggcctgtaaccaccgagataatgtgcatgacatgtgaaaaggaaacaatttttgtgaactccggcacagaaacagaaccatactctgctactctgccgatatcgtttcgggcaagatcaacgagcatgtaatgctccgctttttctttttcatccttcatgagctcaaccttcagtctctcatcttcagctttgtctgcaccgcgttttctcgtaccggcaatcggatggatttctaagtgcccgtcttgaacgtgtattaaccgttccggagagctgccgactatttctctgtctagcagtttcatataatacatatacggcgaaggattgacgatcctaagcactcggtataactcaaaagcatctgcttttatcggcacctcaaatttttgtgataaaacaccctggaagatatcgcctgcttttatatagcttttgattttttctacatcagccataaaagccgatttttcataattagaagatactgtctcaaagctgggtgtcttgtatgaatcagcagaaagaaacagctcttttatgtttttttggtccatcattttttcaatgagattttgaagctccagatgattttgatggaatacatccattttttcgttttttgtttcctctccagtgagccttgcatattggataaagtggacgtttttggtttcatgatcatacgcaattaatgtccggcaaacaaacagcatacacttttccatgtctgtttctttggtatgcgaaggaacagaaggctcaatcagcgggatcatatcatagcttaagtacccgacagctccgccgacaaaaggaatgccaagctcaggtgttttgattttgtatgtggtattcatccagttcagcacttcttttagttcatttcctgtgtaaagagatttgctgtcctgatcagcggccgaaaaacggccctgctcttctttaattgtgagaaatggattcaggccgataaacgaatatctggaccaagtggatgtatcgtccttgctttcaagaagatacgtaatctccctgtcaagcttctctatcatttgaatgggtgtcagtgtatcgactgtgaaggtctccacaatcggtatcgtgtggtgggacaagctgtcctctaaaaatgcggaaatgtttgattggaaattcattgctctcactccttatggcaaggagaatgagaagatggcatgagaggataaaatactatataacaaataaacccaaaagaaagacttcttttgggtagaataaacataatgtctcagctcaactaaactcattctctgctaccctattctctaactcaactcattctaattgctttatacacactcttgtgtatttctaagctgttcttatcgtattacaattcagtattttttgtcaatgataaatcgggcctcaatacgacagctttttctaaatatacatgtctgatctgatcctgagggacatctgtctggaccgtcatcatgactcttatgcactttttcagaccgcctgttacgtccatttcctgcatacatgttaccggtacatactgccatcctgaaagctcgcgaacagcttttgccgggaaaacagcgtgcaaatcaggtgtagccgacagaagcatttgaacaacatcttccggttttgtatgattttcttctatgattttctctaacagctgtttagttttttgtaaaatttcttcttcagtatcccgttcaactgtagttgctccgcgaattccgcgaatcatcatgatgtctcctccaatcgccatttgttcagccagctctcaagttcatttctggaaaatgtatgatcagcaactttccctaattcgttgagcacaataaactgaatcttcccgccacgggttttcttatcattcatcatacggttcaagagaaccgaagtttccgtctcttttctgatttgacttggataacccaggctttttagccagctgaccaaacgttttctgtccatttcacagcctacagtcttttcgcttatatataaagcaaactgcattccgagggctacggcatcaccgtgagtgatctgcccatatccatattccgcctcaacggcatggccgagcgtatgcccaaagtttaagtaagctcttatcccctcttctttttcatcctgctgaacgacagacgctttaattgaaatgcctttaaaaatcatgtcattcagctgatcattagtgatatcacgcagtgagtggatattcagcagctcctccagaaacgctctgtcatagataaaagcgtgtttaatcacttctgccattccggacctaagctctttttcaggcagagaacgcaggaaatctgtatcatagagcacggctttcggctgataaaacgcaccgattagattttttccaagcggatggttcacggctacttttcctccgactgcgctgtcatgcgccaagagcgtcgtaggcatttggatgaaatcaatgccgcgcataaaagtggcagccacaaaaccggcaagatcccctacaacaccgccaccgaatgcgatgatgcatgaggagcgatccatatgaaaacgaatcgcttcactctgcaattttgtgtacatgtccatggattttgcctgctctccactcggtaccgtcacttttttcacaggccatttttcttgcagcaaatggagcatttcatcaccatacaggcggtccacttcttcatccgtgacaaacataatccttgttaaaggcctgtttaaagaggttaatagttcgcaagccttttttctgataccttgtccgataaaaacaggatatgacgaggaagcagtttgaacatgcagtgtcttcattaaaattccctcgacagttttctcatattctccacattttctctaatgcggtcaatttgatctaatccgaattgttcaacgactgcgttcgcaatttcccaagcgacagccgcttcagcgactacacttgccgcaggaacagcacagctgtctgaacgttcaatgctggcagaaaacggttctttcgtttcaatatcgacacttttcagcggtttatacaaagtcggaatcggcttcatgactccgcggacaacaatcggcatccctgtcgtcatgccgccttccagtccgccaagtctgttagtagcacgggtgtatcctttttcctcgtcccaaatgatctcgtcatggacttcgcttccatttcgccctgctgcctcaaatccgatgccgaattccacacctttaaatgcgttaattgacagaacagcggcagcaagcttgctatccagcttgcggtcataatggacatagctgcccacgcctaccggcattccctcgacaatgacttctactattccgccgatggaatctccgtttgcctttgcttcatcaatggcagccatcatttttttgcctgcctcttcatcgtagcatctgacaggagactcttccgttacacgctgcaagtcttcaattgacgtatactctgttttttcagctttaacagcgccaatttgcaacacgtggcccgccaccttaatgccaagctcagaaagaatctttttagctacagcccctgccgccactctgacagttgtttcccttgctgaagaacgctcaagcacatttctcatatcacgatgattatatttaattgcaccgtttaagtcagcgtgcccaggtctcggtctggaaatctggcgcttcatttccttttcttcatcttctgtaatcggagcggcgcccatgatttttgtccaatgcttccaatcgttattttcaactacgagagcaattggcgaaccgagtgtacgtgcatggcgcaccccgctcataattttggcctggtctttttcgatctgcatgcggcggccgcggccgtgtcctttttggcgtctggcaagctcaaaattgatatcttcctccgttatgtaaagcccggcaggtacaccctcaataatggttgtcagttgggggccgtgtgattctccggctgttaaatatctcatgacttcttctcccttcatcgcattaacgcttttaagtaagactactataacatatttttcagcaaaaagtcagtctatcttttttgataaaagaatgtatcggctgggactaggccaaatttctcgggattgaagatttgctcggtgctgccgacaaaaagaactccattcttcttcaagctatgtgccatttttaaatacagctcttccttcgcgctttctgtaaaataaataaatacattgcggcacacgattaagtcaaagtcttgttcataacgatccgccagcaaattgtgctttttgaatgtaatattctttttgatttccgttttcacttcataacttctatttgcgttttgcgtaaaataacgatctttcacagatagcggcacttcctgtaaagaccgctcctgataaacgccttttttcgctttttccaatgctttttcatcaatatccgtcgctaaaatctgatagcccggaagacctttttgctggtccaaaagcatggcaagcgtgtatggctcctcccccgttgagcaggcggcactccaaatttttaaaggcctagaggtcttgattaacggcagaattgcagtctcaagaacttcccatcttttataattacgataaaattctgaaacattgatcgtcattctgtccaatgtttcatttaagagagcttgatccttttccaatgccgcagcaaagtccttaaagctttggaacccctttttctcataaagtgacgttagccttctcttcatttgtgcttctttatatagtgttaaatcgactccggttaattgtttccatttcgttgtaaatacgctgtatgtatccatctctactctcccagtctcgctgtctttttgtcctagtatagcttgttttatcaggaaattgtattgtttcaataaaaaaatcagcttttcagctgattttagatcgttgggaaaggcagaggtctgatgcacactgccattcaaccctttattcactttaatgtaaacctttacaaaacagaacaaaaaccggcggcgttatatgttgccggctctgttgcttattttcacaatgattaatagatccagcctgccataagctgctgatatgatactaattcttcattcttaaagaaaatgttaatctcgcgttctgcactttcgagagaatcagagccgtggatgatgttttttccgacaaacatgccataatccccacgaatcgtaccaggtaaagcttctttagggtttgttttcccgatcagctgtctcgtcacttcaatgacattttcgccttcccacaccattgcgaatacaggtcctgaagtaataaactcaacgagctctccgaagaaaggcttaccttgatgttcggcgtagtgtttctcagccatttgttcagtcactctcattaacttggcgccagctaattgtaagcccttacgttcgaatctagataaaatgtccccaatgagctgacgttggacaccgtctggtttcaccatgataaaagtcttttccatcatattctccaccccatcattatgtatgtataggctttcacactgcacaccgaaatcgtaacatctttctgataattaatcaatccggggcggagaaatttcttaatatctacaaaaattaaaattttcttttaccgatatattttgcgatggctgcaagagacgagcgtgcgcgccctcgaggaagcgtgtttaatttctgaaaagctttctgcagatacatttcgcttactgccatagatgcttcaattgcatctgtttttttgatttcttcaatgattggttcaagctgttcctgcgttgtctcactgttaatcaatttaagctggttttttaatgcaggatttttcagggcatacagcactggcaatgtgacgtttccttgaagcaaatctcctcctacgggtttacccagctcttcctcagttgaagtaaaatcaagaatatcatcaataatctgataagacatgccgacgtaatacccaaaccagtacaatgccttatgaatcttctcatcagctccagacgcaatggcaccaagctggcagctgaccgcgatcaagagagctgtttttcttttgatacggcggagatacgttctgagattttgttccatgttgtatttgtctttgatctgctcaatttcccctagacaaacttcaacgatcgtctgtgacaaaatcctatgggctttcggttcgttaattctcgtcatcatttcaagagatcccgcaagcatataatcgcctgtgtacatcgcaatacgattgtcccactttgctttgattgtcggttttcctcggcgaagctctgcatcatcaatgacatcatcatgaaccaaagatgccatgtgaatcatttccagagtgacggcgacatatttaatcttattaatatcataatcgccaaacatgccagaaagcagcacgaaaacaggccgaatacgtttccctccggcctgcagcaggtgaagacctgcctcgcttaaaagcgggtaatcggaacgtacggtttgttcaagttctctttcgattacatcaatatcgtcatttaaaaaagagtaggccattttaaatttcatatcattcacccaaacatctgtgttttcatttccatccgatatgcgtggcagcgactccgccagtaaacgaatgatatttaacatttttcaggcccgcctcttcaaacaggcctgccagttccttcattccagggaaatctctggctgattcttgaagccaagaatattctttatagctcttcgcaaacagtttcccgaaaaacggcataatatacttaaagtacataaagtaagcctgtctgaatccgaacatttccggctgggacgtttccagacataccacctgcccgcccggcttcactacacgtctcatctctttcagtacagtcaagtaatcagggacattgcggagtccgaagccaatggtgacataatcaaatgtatcatcatcaaaaggaagctccatcgcatttccgtgcagcagttcaatttggctgaatccgccgtcttttactttctgctcgccgacactcagcatattttcactgaaatccaagcccttgatctcgccgcttttgcctgccgcttttgcaagagcgatcgtccagtcagccgttccgcagcagacatcaagtgcttttgcgccttcctttacattcatgatgcgcatcgttttgtcgcgccattttttatgctgctgaaaactgatgacagagttcatttggtcataatttttatatattttttcaaatactccgtgtacgcgctgttcttttgagtcctgcataatggtttacccttcttccactttctgatgataggtttgatcttggctgattgtcttcagacggtttattaaaatgttctgaataggtgaatttagaggcagaagtgactcaatgctgtttttcgcttttttaaaacaatcttctaatatctcttcttttgtttttcccagctgtataaaactgccgatcacatccagaaatgcatcatttccgttcataagccgcttaaatacaaaaaaatcactcgacagctttttccagcgcgggaggttgaagtgttccgccacacgatggaataaagctgattcaacgatgccgacactttcgaaaaaatcgttttcgtccttgaaagaacggtcatacagacgaattttatgttcgttgatttctttaatggctgtagcaagcgtccgaatcatgtagatatccttcatttcagatagtaaagagtagtacagcccgctgaaataatcgcccgcgagaacagtcaattggcggtttttgttttcgtctcgttttatgactctagctgtcgtcacttcatcatgggtatcaagggcgctttgtacaagcatcgctgttacaatataattttctctgtcgttgttttttatgtcggcttcttcaaataaagcatgaaaaagaagaagcttatcctcatcaattttcggcgcagaaatatgcttcgctaaataaggatgagacagcttttgttttaatttcgtgttcagattggctaaagttccgtagatgtcttgcaaaaatatcacccttgtccccaaattcacatttatttcttaatctatgtatgagttttatcttttcattcgcttacgcaggtatcattatagcataaaaaaaagaaattggctgtatcctcccgctgtttgcgagcatttgcttttaacagcggggacagccagcttattttttttcgcttttcatttctccgtacgcggtttgaatcagtgcctctcctctgactttaatggcagaagtatgctctgtaaactgagcgatgatcacttctcccttgtcgagtttttcggaatggtgaaactttgtgtctgttcctcttgtcaggccgatcacattcactccgtcctcaacggctttaatgacgacaaaatcacttgaatgcttttggttcatttatagcaccctctatctttattagtcctggcgtttaatatgttccaatacttctgcacgggcagcggcatcatctttaaaaacgcctctgactgctgaagtcacagttttcgcacccggttttcttacaccgcgcatcgtcatgcacatgtgttccgcttcaaccactaccattacgccatgcggatcaagcgtttctacgatgctttctgcaattgtagaagtgatgcgttcctgaagctgcgggcgctttgcaacggcttcaacggcacgtgccagtttgctgagtcctgtgacctttccgcctcgcgggatatatgcaacatgtgcttttccataaaagggaacaaggtgatgctcacacatagaatgaaacgctatatcttttacaagaacaagctcctcatggttttcaccgaagatagtctggaaatgttcttttggatcttcattcaagccggagaatacttcggcatacatctttgcgactcttttcggagtatcaagaagcccttctctattcgggtcttctccgatcgcttctaaaatttgacgaacagcttgttcgatttgctctttattaacttctttcatgttctatgtcctccaccaatgaatacatttaatttcgattctagcacatatgccccgctaaaagcaaagtgaatgccctgtcaggaagcccatgctcttgaaatatgaaaagccccttagaaaggggcttttctgtgaagaaataaagtgtatgtaagctagatgcatacacgatctatattcacaattattttccggcaactgcgtctttaagcgctttacctggtttgaaagcaggtactttgcttgctggaatttcgatttcttcacctgtttgaggattgcgtcctttacgtgcagaacgttcacgcacctcgaagttaccaaaaccgatcagttggattttatcaccgtttttaagtgcatctaagatcgtatcaaaaacagagtcaactgcttttgtagcgtcttttttagacaattcgcttgcttctgcaaccgcattgataagttctgttttgttcatgcctttcacctcctcccaaaaggatacattcagttcgtttattatcatttcttcacagttcagtctgattctaaacctgtctcagaaaaaaatgagagcaagtaagagaaagacaattaaacggctttttaagaaaaactgcactctgaggaatgtttgtccaacaaagtgaagaatttctgtatgtagagtaacacatataaaaagccatatcaagcattttaaagcgtcaatcccttgctcgtcaaggatttaaggtgatttaccgaacgaatattcctttttttccttttttcatcctattccttgatccttttccattattaagagcaaagaaaaaagacctcccattctataaagaggtctaccggtattacaggatgatggcgattaagccgccagagccttcgtttatgattctttctaatgtttcttttaatttataccgtgcgttttcaggcatcaatgacagctttgcctgaatcccttctctcacaattgagctcagcgaccttccgaagatatcggaattccagatggagagcggatcatcctcaaagtcctgcattaaatagcgtacaagctcttcactttgtttttccgttccgataatcggggcgaattcgctttcgacatctactttgatcatatggatcgacggagcgacagctttcagcctcacaccgaatcgcgagccctgccttataatttccggctcatcgagactcatatcagctaaagcaggcgctgcaatgccgtatcccgtctgtttgaccatttttaaggcatcagacacttgatcatattctgttttcgcatgggcgaagtcttgcatgagctcaagcagatggtctcttcctctgatttcgacgcccacaacttcttttaggatttgatcatatagatgatcaggcgcgtacaaatcaatttctgccaccccttggcccagctcaattccggctaatccggcactttcaatgaattcaaactcgctgaattggccgacaaccctgtctacgtcccggagccgtttaatatccttaaccgtttccttcacggactcctgatagctttcacgcaaccaatggttttctttcagcaccattacccagcttgggagattgacattcacttctagcaccggaaactcgtagagggcctctctgagcacactcagcacatctgattcccgcatgctctctacactcattgccaataccgggatatcatatttttcgcttaaatcctggcgcatggcttccgtttccgggtgatacggcctgactgagttgatgaccataataaaaggtttgccaacctctttcagctcttcaatgactctttcttcagcctctatatagtcacttctggcgatatctccaatggtgccgtctgtcgtaatgacaactccgatggtcgagtgttcttgaatgacttttcgtgtgccgatttcagcagcctcatgaaatgggatcggttcttcgtaccaaggcgtattgatcatccgcggcccgttttcatcttcatatcctttagcgccgggcactgtgtaacctacacaatctactaatcttatattcacatcgagtccgtctgacacatgaacagacatcgcctgattcggaacaaatttaggctctgtagtcataatggttttgccggctgcgctctgcggcagttcatcctgcgctcgggcccggtctgcttcgttactgatattcgggagcaccacaagctccataaattttttaatgaacgtggattttcctgtacggacagcacctacgactcctaagtatatatcgcctcctgttcgttcagcgatatccttgaaaatatcgaccttttccaagtgatcccctcccggacttcctatccttttcaattttattaagctctttcaatcaaacacaggacactatatgtgtatgacgttgtcctatttgaatatgacatctttagaaaatttctcatcctcaatctattaatataaaaaaacctttctccctatttgtatgcaagggagaaaggttcattcctttttcatatcattttctaaaaaaacaggttcctgtttgtcatttaccgtatattttacagaaaacgcggggacaaagggggtttcatgccaaatcatatcctggatttcagtcccgggtttaaacgtttttttgctttttttgaggcaagaagccagctcagtccggtaatcggcatatatttctccgtctccgtcaatcataagcggcaaggaattccctgagattgggcttgtcactgtaagagagctgccatccccaagcttcttctcatcgagtgtaaataaatcacgagatagcacatccttgtaaggcggatattgatgctcctgacgatacatttggatgcgcaatttcacatcgcgaattttttctgccatctttagatcaattaatttaacagtcggatcgttctctacgtcaacaagcacgtattgatagtctcccccgctttcaaatgccgtacttggaggttcagctatgtatcttggcgctaaccggttaaagtctatcggatatttttgatatagcggtgtcgacatatctttggtttgaataggaagcagccctccatttgccttttgaaattcatcaacagcagattgaacctgctttagctggtcttgataaggaatggcatgcacactgcttttccgttcatttggatataaacatccggataaaaacacgactgccgcaaaaatgattgcgcacttcagtttacccatacagcacttccttttacagctttattcattgacagggccgctaaaaaccacgacaaacacaataattccagatatgagcatacacatgtatgcgaatgatgaaatcgcaatcttcaaaaaacggttttggcacttaaagcggcttaaatagatggaagctacagccagaaacatcagacccatggaccctagagcaaaccacattttcatcaatgccagattcaatgacgtgcgcctccccgatatgtaagatataagcgttatattatattttaatatacagcgccggaaaagatcaaccagattttccatccattgatagaacaaaaaaactgaagcaaagagggggaccttcgcttcagtcaacttgactatattcacctgcacgtttaagaaacactctcttggacttcgatgctatagtatgcgacttggcatacagatgcatcctctattgcctaaatcggcaaaatgtttcaggagatcccaagacttgggtgttcttctgtttttcgggctttcgttcaattaagatatgcgattcaccatttgattgacacttttacttcacttgattttcaaacgtatttaccaaatcctccatctcgtgggttttccctctcgccattaaagattcaacagcggtttccactttttgtccgttgaataggacctgatggagagcttctgtaatcggcattttaacatcatatttcttcgaaagctgataagccgctttcgtcgtgcggacgccttcgactaccattcccatctcttcaagaacatcttcaagcttgtacccttttccgagcaaattgcccgcacgccagtttctggaatgaacacttgtgcacgtcacaatcagatcgcctactcctgtcaatccagagaacgtcaagggatttccgcccattttcgttccgagtctcgcgatttcggcaagtccgcgtgtaatcaaagcagctttggcattgtcaccgtaccctaaaccatctgtaattcctgcagcaagggcaataatattttttaaagcccctccgatttcaactccgataatgtcaggatttgtgtacacccgaaaattgtgattaataaatagatcctgcacctcttctgctgccctcatgctctttgaagatgcagtaacagttgtggggtgccgcagccctacttcttccgcatgactcgggccggaaaggacaacgatatcttttctgacatcactcgggagctcaatttccataatttcagaaatgcgcagaagtgaatctggctcaatacccttgctgacatgaacaaagactgcctttttcgttataaaagggacagcctgtctcagcacttcccgaattgcttttgtcgggaccgcaacgataatgacatctgcgtctgaaacagcctctttcatatctgttgttcctttaatggatgtagacagcttaacattcggcaaataatctttgttttcatgcaactcattaatttgatgaattaaatctgcacggtgagcccacacacacacttcatttccattatcagttagaactaaagccagtgctgttccccaactccccgctccaagcattgtgacttttttcatgtttgattcacacctttttattttctagctcttgcaaatattttgattggtgtcccctcaaaaccgaacgcgtctctgattcggttttctaaaaaccgttcgtatgaaaaatgcatcagttccggatcgtttacaaacacaacgaagcttggcggctttaccgacacttgagtcgcatagtaaattttcaaacgagaaccgttatgagtcggtgtcggattcattgccacagcgtccatgatgacatcatttaagacgtttgtttgaactcgaagtgaatgattttcactagctttgataatcgcaggcatcagagtatggatccgttttttcgttaaggcagacataaataggattggcgcataatccagaaattgaaaatgatcgcgaatattttcttcaaattctttcatcgtgctctcatctttgtcaacagcatcccatttgtttacgacgatgacgacggccttgcccgcttcgtgtgcataaccggcgatacgcttgtcctgttcaataatgccttcttcgccatccagcacaaccgccacgacttctgagcggtcaatcgcttttagcgcccgcagtacactatacttctcagtcgtttcatagactttccctttttttcgcatacctgcagtatcgacaatgacaaactcctgctggttgtaagtaaatgacgtatcaacagcatctcttgtcgttccagccacgttgctgacaataacgcgttcttcgccgagcatcgcattcacaagtgaagactttccgacatttggacgtccgatcagacagaattgaataacttcttcattgtatttcgtttcaggaatgtttttaaaatgctctgcaacggcatccagtaaatcacccagtccgagtccgtgtgttcccgaaattggatacggctcgccaaagcctagcgaataaaaatcataaatattcgctctcatttctgtgttatccagtttattaaccgctaaaacaacaggcttttttgtgcggtacaaaattttcgccacttcttcatcagcagctgtcacgccttcacggccgttcaccataaaaataatcacgtccgcttcatccatggcgatttcagcttgctggcgaatctgcgctaaaaacggctcatcaccgatatcaataccgcccgtatcaatcaaattaaaatcataattcagccattcagccgagctgtatatccgatcccttgtcacgccaggggtatcttctactattgaaattctttctcccgcaatccggttaaagattgtggattttcctacatttggtctcccgacaatggctacgacaggtttacccatagtacccttcctttcaatccagccgctttcatttttacataaattttcaaccggttattaaaatcatttcattcacttttatgaaaagaaacccttcagaggaagggcttaactcatttattatatcagtttttactgggatcacaactattcttaaaaatgtttcacgatcaaatacacgtcatctccgattctgtgagctattccatcaaggatcgcctcaagatttttagcgaaaagctccatctccttttggtcattgcaaaaaaagacaggtgctccccctgcaacccgatttcgatttgtcgtgattacagacaaaatcactttcgtaagagattcactcatcctatcaccttatcctgattcttgataaattcagtcggcattctaatcgcattttccagggttggaacattgctaataatttgaacagccgtttcgggatggtgaatttgcgggagaacaaatactgccactctcccatcatttaaatcccgttttgcaattggtgtcaaagatggctctcctgaatcccgataaaccccgagcacattggaaacatcaaataaaatggcctgacgctgccctaaatttgctatcgtcgctgctgaattaaagtttttcggcgtcaaaataaagcccatgccatgctttaaaatcagttcctgtttctctggaagcccgatattcatcatataaatattatcaacaaacagtcccggaccgtcaaagcgcggctttatgtactcgatatctacaatatccttcaacacactgcccgacataaacttcatggccagtaaaaaacaaacgacagccgctatgactgcagcccagatggataaaaacacatacgcagaggttgtcaaaagcgctgtaaagatcacaatataatttctgctttcaaacgcaatggcaatcccctcaatatatgtgcttccccttgagacaagttcatacgaatccatttgcgtcaatgtgttccgctccatgtttcggacatctctaaattgcgtcgctgccaatgttaaaaatgtgatggccgtaaattcctcctgcaaaagcgccggcataataattgcacctaaaccagccgctatcaaccccagtgcgatgtgaatcactttcccatgaacataggtcggatactggcggtaatccgttttcagcatataaagccttgtcgcaattccggcaatgaccccagcaataatcggatagatgtaatcactcatgacattttggtagctcctttgtttgatcttttgcttttctgaccaatctggcttgcgaggtgttcgtatttagatatgccaaacagcaatatcatccccgcagaacacgcattcagccattgaaagccgccgacagccatagccccggccaacttctggatcacaaatgaatacaccagttcgccttggcacatccctaggacaaataagacaagctgcttctcaaaattcctttcaacagaagctgttaaaagcactattaatataacagcagcccactcaggttttatgatgaaccaaaccgggtcatataatgcaaaaagataaacaaacgcatacgcggcaacaagcgtcagatagaccatgatgtaacgaaaacgatacattcccaaatacccggcatagacacatccgcaaacgaaaaacatcaaatatgcagcattcagggaaaaatataaagcgatgtcatgtatgcttagaataatattagttaaaataaagacagagacggcaattcgtcttttcgtcttttcaaaaataaatgttgtcagaacccacagaaaccacattgaccaatagtaataaaattgttccattttacttcctccatattcccagtatggagttcaagcacattttttaaacaatcgatctcacattaaggagtatgatcatgggaaaagacagacaagagaaaaaactcaaagcttcaggcagagtcgaatcagatcgcgaccagtccattcactatgacggagcgacaagccttgaacaaaacggaagattcaaaaagcgaaaatcataatacaaaaagcccaaaccacatatggttttgggcttttatcatttatcgcacactatagcttgatgtattgacccctctctctgtgagccaatgatgggtttcacctttgatcacaaggggcgccttttgtaaatcggcaattgttctggcacccagcacggtcataatcaactttaattcctcaaggatcagctgaatctcctcaagcagtccttcctcaccgctgtcagtcagcgcttttaaaaaatgccctgccattccggtgcaagaggcccccagcgcaattgcctttgccacgtcaagcgcatcttgcagaccgccagaggcgatcatggtgcttgcaggaaactcagagcggatttccgccaaacttgcagctgtcgaaatgccccacgaattaaaaaaggagatttgccgctgtcttcggagattttcgattttcgagaaatttgttcccccgtaaccgccaatgtcaacagctgcagcaccagcttcatacagctttcctgctgatgctttgctcataccgaagccgacttctttcacaatgaccggtacactgacccggctgcaaatttgttcaatgcgtttcaatgcgccgctaaagcttctgtccccttcaggcatcacaatttcctgaatcacattgaggtggatctgcagtgcgtttgctccaatcatctcaacggcttcctttgcctgagcagccgttgcctcgcttcccaggttggcaaaaatcagcccgtttgggttttcctttcgaacaatttcataggaaagacgctctgatggatcttttaatgctgacatttgcgatcccacagcaaggggaattccagcctgagaagccgctcgcgcaagcgatttattaatctcatatgtaagttttccgccgccgccagtcattgcattgataaaaatcggcgaactgcttgaaagttcgccgatttttgtggaaatatctacttgttctaatgcaagatcgggcagactgacgtgaacaaacgtaatatcatcaagacctgtttcccgcttctggccgatggacaaggcatgattgatgtgttgtctttttcgttctgctcgagtcacgtttatcaccaattattttagtttattcagcttatctccgatcagatctccaagctggaagccagtgcttgtttcttccttcgcttgatattgacggtaatcttcctggtcagctttaggcgtttcttcaagttcacgcatgcttaatgaaatgcgctcctcattttcattcacatcaagaaccttcacttttacagtctgtccttcttcaaggacttcatgcggcgtgccgatgtgtttattggaaatttgagaaatatgaacgagaccttcaacacctggaaggatttcaacaaaggcaccgaagcttacaagacgctgtacagttccttcaagcacatcgccaggcttcactttttcgccgatttggttccaaggtccaggcagtgtatctttgatcgataaagaaatacgttcattatcacggtcaaccgataacactttcacttttacttcttgtccctcttcaacaacgtcagacggcttctctacatgagagtgggaaagctgtgaaatgtgtacaagtccgtcgatgccgccaatatcaacaaacgcgccaaagtcagtcaggcgctgtactttgccatcaagtacacttccaacttcaagagactgaagaagttcttgttttttattcgcttgttcactttcaacaacagcacggtgtgaaaggatcacgcggtttttatcacggtcaagctctacaacgagcagtgacagtgtttttcctttatagtcagtgaagtcttcaacgaaatgtgcttcaacaagtgatgccggaataaaaccgcgaacgccgatatcaacgacaaggccgcctttcacgacatctttcacttcagcttcaaacacttcttttgtttcaaattttttctcaaggtcttcccaagcgcggtctgcatcaacagcacgtttagataaaatcaaagcatcgtcttccacttttgttactttcaggtcaagctcgtcgtctactttaacaacatccgatgctttctctacatgaagacttgataattcactgattggaataataccggattgtttgacattgataatttctacatctacatgtttgtcttctacctttgtcacaatccctttaactacatctccaacctctggcacttgaacatcaatttgattcatttcctctgtcatttgaataacctccttggtccaaacctacacagcttaattaaaacggtttgaaagctgaacatataacatgcccgcttttagccgaatatgtattaaagaatcatccaaaaaagttttttgaatgatcaataaaaagttttattagtattaacttctaataaaaggacaggtttgtcaagcaataacattctatcttcgttgaaaaattcaaaaaaagtggcatttgccatcctcagcgggacttttgctccacagcctcgaggattttatcagctacctcttgaatggaaagcgatgtcgtgtcgatttcaagagcgtcttctgctttacgcagcggagatacttcgcgctctgaatcaagcttgtctcttcttgcaatttcctcaattaatgtttcgtagttgacatcaaagccttttttcacattttcttcataacggcgtttcgctctctcttccacagatgccaaaagaaagatttttacttctgcatttggcagcacatgcgtcccgatgtcacgaccatccatgacgacgccgcctttttccccaagctgctgctggcgtttcaccatttcttctctgacacttctgtgcttggccgcaattgaaacttggttgctgatttcatctgttctgatcgcctcagttacatcggtgccgtttacaaacactttttgtccatcttttgttgtaatcagctcaatgtctgtccgctttagcagctcagccagtttttcttcatctgtcagatcaacgttttcctgtaaagccgcgtacgtaatcgcccgatacatcgctcctgtatcaatatatatgtacgattttttctcagccacaattttggcaacggtgcttttccccgcagctgccgggccgtcgattgcaatcgataatttcttttccataattcctctccttgctcttttctcctctaaggattgtatcacgaactttatgaaaaagggtgaaaaattgatgaataattaatgtttgaaggtttcaatcctattgttttcctccattttatccaccccttcatattgaatcacttttgatacgtatggttcaatatgctgatagtgaaaaagaaattggacaccaagtaaaatgatggcctgaatgaacaataatttgatcagcagccgttcaaatgttttcattggagcacctccattacaaatagtatggaagtgtttgccgatgtttattccattcgggcctttcttctcttatttaactggcgcctgatgcagtattgaagcaaagcctgctggtcacctgctgcaatttctgaatactctaaagtcatttttcgtttttctgacttggggtcattaaagattcgtctgacaactgcttctgtttctatttgacgtgtgtgctcctcttcaggaagacggatgatcaggcgcaatgattcccccgattgaaaagaaaggccatcagctaaaaccacggcgatgccgcctgcactgatgttataggatagtgtgcggatctcttcttcatttcccggctgaatttgcacatctaataccgcatcagttcttacatattggcggcgctggattcttttcattttttcacggggaggcatttcaagacagatcatttgaagtttgtccttcactttaccttttatacggcttataaagcgataaggaacttcgtcttttcccacaaactctaccgttacttccatatcgttatgtaaaatcacagttcgccctgtaactacatcaacaggatacgcgatcaaaagttcattgttttcgatgctgaccgccttgctttttgcctttttcaattcattttcttctatatattctaaaagtacattttctccaatctctatcattgacttcactctttcgcattcaatatactcacgtttttattaaagcacgtaatgaaaaaaaggaaaagacatttagtcctttcctcctgtttttataggtctttatatataggttctgcattttttagtttttcaaccttttcttccgatccgtctttggcattgatatacattctgaatgtgtcattttcaattgtcccaagcatttcgtagcataacacttcttgacctagttcatttgtaatcaaagcgagccttgtttctctcacttgtacatttttatttaatttagactttgcctctgcttcagtaattgcaggcttaggtatggttctttttctgtgagatgtgaggaagtctcttgctgaaaagccgacaacctcaccgtcatccaaggccactttcatacgaattgcctcggggtacatccggactttattttcaacaggaacatatgaaaatacaccgattttatcatattgggcactttcatcaatttccaaatcatctgtttcaaatccgtttttctttaaaaatgcaagcgctcggttcgatccgtcatttaaactgattttctgatctttcacttctctgttttggatcaagtataccggatgcccgcccttcttcgtaatatccatataaatcactgctttatggtctgggtctttcatgctgatgctatatacatcgcgatttgttttttttccgctctttaccactttaattgaataattgtcatctggggcaaagcgctcagcaatttgttttgcttcctgttcggaaatttgttttcccttcagatggctgaagcctttctcttcttttttcgtactggtgaaactcgggccaagatcagtgccagtggagaatgcaccaacatttttttcgactgttttaaagctgttgataatcgtattatcactttgtttttcgtcagaagccagagccatttctacgtccatccagcgaaggtttttgctcatgacaaggtgctgaacatgacgcaattcattttgtatatcttcggactgctgatatagcttatttagtgatgtatactcgtttttatcaagcggcttttggtccaaatctctgactgacgttttatagctgaaatcgccgatctttgataatagctcttcagttttattaaacggcattaatgtaagcggcagctgactgacgctgttatgagcttctgatgtaatcctccacacatcgatcaatgcaggcgacagtgatttttggctgttcatggcaagtgttgttccgattttatcatgaagctgatccacctgataggtaagctcatgaaacgcccgctgatagttattttcagcatgaagaagaactgcgtctttttcctggtgttctttgtatccccagtagcctgtaccgactattgcaataccaagcacggcgattaaaattcctctgatcatttatcacacctctttttatgctttctcatatctgctactcacagaaaatgtgtttaccgattcttttaatctgcggacgcccccaaatccacggacttgtagccgtatccggattaaagtagtaaagtgcttcctctgatgggtcccagccattgatggcatccagcactgcttctcgtgccgtttcattcggctgcatgtaaatttgtccgtcggctactgctgtgaaggcaagcggctcaaaaataacccccgctactgaatttggaaataacgggctgttcaaacggtttaaaatgactgctgcaatagcaacctgcccctcgtacggctcgccccgggcttcgccataaaccgcttgagcaagcagcctgatatcgttgttggaaaatccaccaggcatgttcgctgctaccgcatcctgttttcttgcttttgctggtgtattgttttgctgtttattcgcattcgctttaggcttctgcgttgttttttccgcaggctgtttctgccgtgcttctgcttgttgtcttgccttttgtgttgctgcttttgatggtttcgtctgatactttagcggaatttttccgtaatgcgtgaatgtattccctttattgagctgttccatgacatattcacgatagtattttgatttacatattaaggtttgctttgttttagctcctacaaggccgtcaacctcttttaacccgaattgatcctgaaaatttcgaactgcccagtacgtcccccatccataaaccccgtcaatttttccgttataatatccgttgtattgaagacgcgcctgaagctcgaccacatcatcccctgttgcccctctttgaatgacctgattcgaaaaggcagagatcgtttcagtattaataaacgtcgttattgtaaaggaaaaaaggatgagacatgccataatcgatcctttggacttcatcttttcaagcctcctactgcaaatttttaagtgtaatcgtattttctgtaacgaggttatttttatacactctttccttgttatccctcagaacataaaaactgcacacaaaaaagccgcacggttgctgtgcggcttctatacttgcatcatattaacggaacgggcttttttcgctttacgcaaaccaaaccaccataaaaataccataaatggaagcatataataaatccaattgctaagcgctgttaggataaaatcatatgatccatgcaaaagggatgggacaactaaagaaagagtaagccactttacacgcgccttatcagcggaaaaacgggcttttccaaggtaaaatcccattataacgccaatcaaggcatggcatgaaacaggcagcagcgccctgacaaacgcatgctccacgccgtggccaattaaataaagaatattttcgagggttgcaaaaccgagtgatacacttgcaccgtacacaatcccgtcataatgctcatcaaagtgggcgtgcgggtaaacactgatcatcagtataaaccattttaatgattcctccaaaaaccccgaagataaaaaagaaacgaaaaagcttccgcctcctacattctctttttcaagtacatactggataaacatgatgggaaatacaagaacaaccccgagaaaaaacgaccgtagcaccatatgtacaggttcattatcatactgatcttttaaataaaaataacttaataacgcgatgccgggggcaattcctgcagagatgattgcaaacatcaggcaacctctttcctttatattcctacatctatcctaccatgttgtttaaaattttacatctgtctgcacttaaaaaaacaaaaagagcatacgaatgcatcatatgctcctcatctttaatggttttctcttttggcgatttccgctgcgatatgccccccgtgaaacctgccgttttcaataaatatttcatttgcattgtttcccgcagcaataacaccggcaataaagacaccttcaacgttcgtttccatcgtttcttcgttgaaaaatggacgccctgtttctttatcaatttcaacaccaattttttcaagaaattgatgatcgggatgatagcctgtcatggcaaatacaaaatcatttttaatggtaatgagttctttctctccggagcgaaacacaacttcattctcggtgattttttcgacacaagctccaaattccatacggattgtaccgtttctgacgagagcttcaaattccggcagaatccacggcttaatgctcggagaatactcattgcccctatataaaactgtgacacgcgccccagatttcacgagttcaagggcggcgtccacgcttgaatttttcccgccgatgacaacaacatctttatcaaaatacgggtggccttctttaaaataatgaaatactttcggcaaatcctcaccgggtacgcccatatagtttggatgatcataatagcctgtggcgatgatacaatatggcgtcgtgtaggtctcttttgacgtctcaataacgaatgtgttattttgcgttttcgtcactttacgcaccatttcaaacgcattaacacggatgtttttccgtttaacgacttcccggtaatacgataaagcctgaattctgacaggcttcctgttctctgtaataaatgccacatctccgatttcgagcttttcacttgaactgaaaaaggtttgatgcgtcgggtaattgtaaatactgttaacgacattgcctttttcgatgacgagggcatcaatgccaatttgttttaggtgaatggcagcagatagtccacaaggtcctccgcctataataattgctttttcttgaatcatttctgtcaactcctgcgattggcatttcacttcatattttctatttccgaataaaaaaatctcctattttatcataggagattttttatttttatgcaaatcatcaacttatatccagcctctaaaacgcgaagcttcagccattttgcgaacgccgaccatatatgcagcgagcctcatgtcaattcttcggttgttagccatttcgtaaatattgttaaatgatttgaccatcattttttctaatttttcttctacctcttcttcactccagtagaagccttggttattctgaacccattcaaaataagaaactgttacgccaccggcacttgccagcacgtctggtacaagcagaatgtcccggtctgaaagaatttttgttccttcaagcgttgttggtccgttcgctgcttcaacgacaattttagcccggatattatgggcattttcttctgtaatttgattttcaatcgcagcaggaacgagaatatcacaatccagctccagcagctcttggttggtaatggtatcgttgaaaagctttgttacggtaccgaagctgtcgcgtcggtcgagtaaataatcgatatcaaggccttccggatcataaagtccgccatacgcatctgagatgccgacaacttttgcccccgcatcatgcataaattttgccaaatagcttcccgcgtttccgaagccttggacaacgacacgcgcacctttaatatcgatgcctctcttcttagccgcttctttaatacagatggtaacaccttttgctgtcgcagattctctcccgtgagatccgccaagcacaagcggtttgcctgtaataaatccaggcgaattaaattcatcaattcttgaatactcatccatcatccaagccatgatttgtgagtttgtaaatacatccggtgccggcacgtcttttgtcgggccgacaatttggctgatcgctctgacataccctctgctcagacgctccagctctctaaacgacatatcccttggatcacaaacaattccgcctttaccaccgccatatggaagatcaattatgccgcattttaaactcatccaaattgaaagcgccttcacctctttttctgttacgttcgggtgaaaacgtatcccgcctttcgttggaccgacagagtcattgtgctgcgcacgatatcctgtgaaaatctttactgaaccgtcgtccatacgaacaggtatttttaccgttaataatctcatcggctcttttaacaattcgtatacctcttcgggatatcccaatttttccagagccttatgtattacggtttgggttgattttaatacatcaagtttgtcctcttctgtatgaccggtgtttcgatcggctgccatttgagttaacctcctagaatcttctgtttctcacatgctccctttcagagaatagtatacaccttcatatgatctgtgcatagaataaacgttatgtttttccatgttttttaacgaaaaaaaactgctgaaatcagcagttttccgttgcattcttatgaaaaatgagtttgtatcgtttctacggcattaccgtccataatgagcttaccatactcttgcaggcgataaatcgttaaagttgtcggattgccgtattcagccagaaccgccacaaccccttcagccgtatgtgaccctagatcttcaaggcttaaaaagtactgcccgtcatagtggtagacagttccccctgtgataccgattcgctgtaagctttctgaaagctgaatgatatcttcaaaggaatggaattgatatatgatgtccgcgctttcatcaagcttgacttgcatttcgatgtaatcatcatcatactcatcgtcttctgaatcggcgtcttggttctttgttacaatcacgaccatcccttgtgcttggagagaatacacttccactgcaatcggtccattcgcttcaaagccgagctctgtatttgcttcattcatcatatctttaaataactggtggactttaaatgagtccttccagaggtcttcttttgtcaatccccggtctgtcaaatcatcgagggttaaaaagattttgatcttattataattcagacgctcaagccgcataacgttccctcctgcctctacttgcacacaaatcatataacacattatatgagatgatgagtcataggttcttaattgttatcagtttacactgagttcactagtaagacaagcacaatgcagtttttattgccatacggatttttgctttttagaagttattctggcccgcaaagagtcacaatgtgagtttcaggctcagcacctaaacgaagaggcacttttgtcgtgccgtagccgttgctgatcagatatgccgcgtttttaacaatacctgttttccccagttcataaggaccgaattttccaaacctgatctggcctccatgggtatgtccgctgagtatcacatcaataccgtcatcttcattgatttgttcatgaatctccggattatggcaaaccagaatattcagctggctttcatcaagttctttgatggcttcctcataatgatccatctccatcctgatatcatcaacccccgcaatcgcaatcgtatgcccattgtatgaaaacgggactgactcatttctcagagtgatgacgccgtgcgctttaaatatggaatacagcttatgctgcctgacttcataatcattattcccccacacaaacacgatagggaccccgaaatgtacgagccttttgatgttttcctcgattctcgcactgggcaccccgccctcagctaaatcaccgccgattataaccaagtggggggcatggcttcgcgctttttctaaaaggtcttgatcgatgagacgtttgtgaatgtctgaaataaaaaagattgtcagaggcggcttgcccttcatctttgataaaggaaacgtatgtgtcttcaaatgattgccttttgctgttgcatacatttttgccgtcattgccgctgccgcaacagttagtacaccggcaattttcactgatagcttcataaaaaactctccattctttttagaacttatcaataagacggacaataaaaaaagacgtttctatcgtttgagaaaacgccccattttatttactttcaaaatatagattaatgtcatatttgtgcttcatcatatgaaaaacagactctctcgccttccatttatcgggctgcggccagagatcagtgcttttctgaataatttcacatctcagtttatggaaatcagtctcggatttttcttcctttttcttgaaataatatgaagtgcagtaggcaaaagcggttgccagcatccaaaataaataaaaggtatggctaagtatttcttgaagtataagctgaggctccgggcttttgatcatgatcataacacataataagcctaggcagataagtgaagcccatcgccatctgcggcattgtgctgcataattttcgaatttttgttttcgttttaccagcgcttggagcatctgtttggtcggcgcgtctgtaaactgatccagctgattccataaggattccatacgcttcacaccttgtccattttcattgctacaatatatgaacgtaaaataaaaataataccctattcatccattaaagggatgtccaaaacttgtccggtgtaaacatcatttccattcagatgattatatgctcgaattttttcttctcctgtccggcttttataatacttcatggaaatgcggtatagcgtttctttcttttggacggtgtgcttgacaacgcgattcggcacattttgaactggctcagctggctgttcttgctgttgtactgttgattgggaagaggaagcagccgcggcggttgcttcctccttatttggcgagtcttctttttccgctacagcagtctgtttcttatcagcagctgtttgctcttttggcttggaatcttctggctctttttttgactccttctgcagtgcggtttctttagtgtctgcggtatcgtttttatcctctgatttcgggacaacctcatatttgctttggctgctgtcaataaaaacatcttcataatcgtcatgattatccgggtggctctttagataaaataaggtgactaaaacgataaccggcacaaatacaaatattactgcgagtactgtgaataatggcgtttttgttttgccttgcttttttttctgttctctttgattttttacagattgtcttgtcggaaggctttctccatcatcgacataatcgtccgccaatgcggcgttttgatcttcataaagattctgggcttttcttctctctactctcgacatgttcgtcatgtttatccctcctcacatgttcaaaacgaatctgacaggcaaacacggcatcaatgataaaatgcgccgtcatcggaacaaataagttgccggtccattcatacatcagaccgagcaaaaagctgattgctgtcaccataataaataacagccattttgacaaataccgaaagtgcagagcggcaaatataaggctggccgtccataaaccgatatgagtctgcagcactcctctgaataacatttcttccgcgaaagcaatcagaagcgttaaaaatataatatgagggattgacctcttactgaatatttttttattgattccgccgtcatcatataaatgagacggaaaccatttcattactgccatatcggctaaaataacaataacagctatagaaacaccataccagatgattcgcatatcgcgaatgtcccagagctttaatacgtcccgtacatcctcaaaaaagaacagtcctgctgcagcagcggcaaagatgatgagtagctgcgtcaaatataactgcttcagcatatcatggtcagtcatatgctgaatataatctttttgctgtttcagttcagctcacctacagtctgcaagctgaatatccggtgcaattccgaactccagctgtctaatggcgccattttactccgttcccctttttgttcatacaaggataaatcaaaaccgcaatgtgaacagcacgggaggtttccgtcatcaggctcgtatgattcatcaaagtaggttaacagtgcctgccttaaacagccgtcacgctgaagcaaaaatgatacacggtgcattttttccagcttcagctccatgcgatatgaaatttctttcttcatcagttcaactgatgtttttccctgcataaagagatgaatcatcatacgggcctgtgtctctccgacgccatactgaagtaatacgtcacgcagccttctctcatcccgctcctccgtcttctctagcacacggattacgtcggcgatttcttcagctgtgacactctccatctggataatttgttcctgcaattcaaaatcccctggcgcccgcagcaaaatgctgacactcggctttccgtcgcgtcccgctctgccgatttcctgcataaaagcttctgccgtctgcgggagatgaaaatgaatcacatatctgatatcaggtttatcgacacccattccaaacgcattcgtacaacatatcacatcaagctggttatgaataaactgctgctgaattaaaatcctgtcccctgactccaaaccgccatggtaaaagtcggctctgctgctcgttttgcttttaatttcacccgctaattccttagcccatttccgtgttggacaataaacaattcccggaccttgcaggttttcaaccagctgaatgaccctatctattttttcggcagtatccgccgcattttcaaccctcagtgcgatgtttgggcggttgactgagttgagatggcgtacagcatgctgcagctccagcaggttcatgacatcttgcagcgtttcctttgtagccgtggcggtcaatgccagaacgggtgggtgtccaagtttttttctcagctgtccgagctttgaataatcaggcctgaagtcgtgtccccattcagaaatacaatgcgcttcgtcaataacaaataggctaatcggaacgcttttcaatttttccaatacatatggagactgtaaagcttcaggagacaagtacaaaaatttatatcgatgaatatgttctaaaacaaattgtctttcctgcctgttaagcatgctgttcaaagctgcagcacgcttttccccccgggctttgagctgctgcacctgatcctccattaaagaaagcagtggagaaacgattaataccatgccatcaagcatataaccaggcagctggtagcaaagcgatttccctcccccagtcgggagcattgcaatggtatccttcccgctgagtatgctttcaataatgtcctgctgcccttttttaaaggaagtaaaaccaaaaaactgatataacgtttgctgtaatttagtcatattgctgcacctgctttgtcaatgccagtctgatttgaaagtagctgaaccgctgttccagcccgtcgcgaatttgtttgattttattcgtccgcatccgtttggcaaactctgcgatttgaagctggtcttctgctgatacatagtcattaatcataaacgcaggctcatggagagaaatctcgacaatgtggtcttcaatcgtcgctgttttcagctttctgatttcagcaattcgctgtatcggaaacccttgtttgaccatctgccatgttttcctcgtcgactctgtcagggcattatctaagtgcacatcagaaaggagatcctttaacaaagcatcttcacactccggaagagaatgaataaaataatgtaccgaagcccaaaacatgatatagacataccattcgtcttctttcagcgtatcagcaagctgcctgctcgtataaccgatccgatggtgcgaggttaaggagtagacaaaaatttgcgctgctttgttttcaatctttttcaaatgcgcctcaagcatggcaaaaaggctttttgccatctctatatgatccgtatgccgggacaggtatttctttacccagtgaagtgtcttatgatcctttgtgacagggatatactgcctgctcccttgctgtttatgggataggacctgcacaagcagcgaaagccttttccaaagcacgccggcagcctgctgataatgagcgccgtgacaatgaacgggccaaggccgctcgctaagggcatgtctcaaaactgctgcgccgctggctgtcactttgtatgtatctgattcagacattggcgcgagatatgaatgcttttcaagcttgtcaagcgacgcagaaatatcgcttctcgaacattttgccgccattccaaagtattttgcagtctgaaataagccggcatcttgaatggtctgtgacgatctcttgcctttgaataggtgaaaaacagcgcttcccgaccgttccccgtttattttgcaaagacaatcgagaaccataatatcgaagtaatttaatgacaacctatccacctacattcttcctgacaaaaatcgttgatttgctctttttattttaacagatttcaaacagaaatcgacgtttaaagtcatcattaagggggatgttatgtagataaccccttatgtgataagcattctcaatcatttttctgttgaaatgtggcagcaacatcattacaataagtaagaggaataggtgttaaattgattaaatataaagattgatccatttgttccaccaagaacaatctgggaggttttattcatggcaaagtacacaatcgtagacaaagatacatgtattgcatgcggcgcttgcggagctgctgcaccagacatttacgattacgatgatgaaggcatcgcgttcgtaacgcttgatgaaaacaaaggtgttgtcgaagttcctgaggtactggaagaagatatgattgacgcatttgaaggatgccctactgattccatcaaagtggcggatgagccatttgaaggcgacccgcttaaatttgaatagaagtaactaaaaaaagctcccgaacgggagcttttttatttaatggatatgtgcacttcgctgctgctcaatccatggcttaagcttgataaaaattagtgagaatacaaccgtaattacaataccttttatcatgttaaacggcaggatacctgcgacgactgctgtttttagcgcgctgtcggataatgccggtgaatgtaaaaaccacgtgtatgccggaagaatcagaacataatttaaaatactcattaaaatggtcatcgctgcagttcccaaaagcaggctgacagccaagccctttgctgagttgagttttttaaataagaaagcagtcggtaatataaagagtgttcctgcaataaaattcgcaacttgccctacaggaactccggccatgcttccctgaatgatatactgaagaacattttttatcgcttctacggcaatacccgccaaaggtccgtaaatcagaatggcaataattgcgggaacgtcgctaaaatcgatttttaaataatccggaagacccggaaacgggaaatttaacagcatcaaaacaaatgcaatgctgctcagcatgctgaccacaactaatttttttactttcacttcattctctccttttcgatcacatcttactcgaaaacggaaaggttcttttccagccaataaaaaaaccgcttcatatataaaagcggggtttcgaaaattaggctaggcaaagaaacgtttgaaaaattcaatttcaaaacgcttatgaacctccatcttctcccatccagactgtactgtcggctccggaatctcaccgaatcctgctgtaaagacagctcgcgggcttagagccattggctcatcaccgccggtagggaatttcaccctgccccgaagattgatcatatgaaatttaattacattataaacgataactggttggctgtatagagaattgcttcaaattaaatatattacctgcaagctgtcagatcattgatttattaggctttacttttatcctttactgcgtcaatacacgttgacactcttttgagaatatgttaaattatcagatatttagtttgtcaatttaggaggaaatctaacgatgtttcgagtattggtctcagacaaaatgagcaacgacggtttacagccacttattgaatcagactttattgaaatcgttcaaaaaaacgtagcagatgcagaagatgaattacatacttttgatgctcttttggtgcgaagcgcgacaaaagtaacagaagaccttttcaacaaaatgacttctttaaaaattgtcggaagagccggtgtcggtgtcgataatatcgatattgatgaggctacgaaacacggggtaatcgtgatcaatgctccgaacggcaacaccatttcgacagctgagcatacatttgcaatgatctcttctttaatgagacacattccgcaggctaatatctcagtgaaatccagagagtggaaccgcacagcttatgtcggttcagagctttatggaaaaacgcttggtattgtaggattaggccgaatcggaagtgaaattgcacagcgtgcgagagcgttcggtatgactgtgcacgtttttgatcctttcttaacggaagaaagagcgaaaaaaatcggcgtaaacagccgtacatttgaagaagtgcttgaaagtgcggatatcattaccgttcacacgcctttaacaaaagaaacaaaaggcttattgaataaagaaacgattgcaaaaacgaaaaaaggcgttcgcttaattaactgtgcgcgaggcggaattatcgatgaagcagcacttctcgaagctttggaaaacgggcatgttgcgggagcagcgcttgacgttttcgaagtcgaaccgccagttgacaacaaacttgttgatcatccattagtcattgccactcctcacttgggagcatcaacgaaagaagcacagctcaatgtcgccgcccaagtgtcagaagaagttctgcagttcgcaaaaggcctgcctgtcatgtcagctatcaacctgcctgccatgacaaaagatgaatttgctaaaattaagccttaccatcaaattgcaggaaaaattggcagccttgtatcacagtgcatgaaagaaccagtacaggatgttgccattcaatatgaaggcacaattgctaaacttgaaacatcgttcattacaaaagcccttctgtcaggctttttaaaaccgcgcgtagactctactgttaatgaggtcaatgccgggggtgtcgcaaaagaacgcggcattagcttcagtgaaaaaatttcctcttctgaatctggatacgataactgcatcagcgtaaaagtgacaggagaccgcagcacctttactgtaacggctacgtatattcctcatttcggagaacgaattgtcgagatcaatggatttaatattgatttttatccgactggtcacttggtgtatatccagcatcaagatacaacaggtgtcatcggccgagtaggacgtattctcggagataatgatattaacattgcaactatgcaggttggccgtaaggaaaaaggcggagaagccatcatgatgctttcctttgacagacatctggaagataaaattgtgaaagaactaacaaatgtccctgatattgtgtctgtgaagctcattgatctgccataattaaaaaaactcaagctatatagcttgagtttttttattgttctatccccgtgtgtttttatgcaaaatatctaagacactccttagctcagaaacaggaatttggcctggtgcggacgcctcttctccagctccaaaagtacaagccgatccaaaaacctcaccgctcagcctgctgatgagccctgttgcagccattgacattgtaataatggggcggtctgcatatattgttttcattgtatacgtcgcatcaagcagtgttaggagatctccagtatcattcggcatgacagccatttttggaatatgcgcgcctaagtcctgcatttttcgaagtctggaaataatttcatcttttacaggtgttttttcaaagtcgtgatttgacatcaccacatagacgttgttttcttccgccagcgatactaacgcttttacatttgcatctcctgaaaataattcgatgtctatcagatcgatgtcttttgtttggattgccgattccagcaaagcaagataggagctttcgtccatctccatgctcccgccctctttgtgggttctgaatgtaaatagaaatagcttgtcttctaaagatttacgaagcttagaaatgagctttgtgaccgcttctctgtcattcgctttttcaaatacgtcgactctccattcaacaatgtccggattcagtaattttactgcctctgcttcattcagaatttgtttttccgtctttcccatcagcggaatgatgattttcggcatcccttccccgatggaaactcctttaatcgttaacacgttcactcgtctcaaatcctttcaatctttaccttgttttattatacacgtacaacttttttttgaaaatttctattatatgaatagcaactaaaaaagagccttaaagggctctttttagtttaaggaaatcggatttggagcagctggcaccggaattgcatctgatatgtcatatttgccgatttttttcgttctggtttccgtaaaggtcacttctgtgaagccaaactcttttgcagtcaaaagtagtccctcaatcattaaaataccggcaatagaatcatcaacttctgactcctttgaaaagcggatatataagtgtttctgtttcttcgttacagattggacagcacccgcttgaataagaggtgtcgtatcttcttggctgctcgattccatttccttaatcgcttcttttactgtatcaaaagaatgatttgacggaacgagaaagtcttgtccttgtttattttggtacaagtagtaggatcgttttgactgtttgggaatcgaaatttccgtaaaagtgccatatgagccaatccgaaccccagtctcattttgatccgataaaaatttgactttttcataaggactccattttaaggattctttaagcaatttttttaacagtgtatcatcttttatagaaaatgccgtagctggctgatggactcgtatacttaattccttctgctttggtttttcctttatttctacttcatctatgaaggttggaattgtaatggcatgatcaaggatgcccaattcactactttcaaacagcatatcctggatcgtttggtctgcatttgttttttgaatgctgacgggtatgattgcagatgtatcggcatcagcaaccgctacagtgatgtaattgtcttgttccttttcaggaacgacaaacgatgtctgatccaaggacgatgcagcttttgggctgtcttctgtctcagttttcgttactgcgttctcttgggacgcttctttttgttgaggctgtgcctgatcaaagaaatgaggagaaataatgaaggcgatataaaccgcaattgcagcggcacacgcggggccaatccacctgacagcgggcttatttttacgctttgccatcgtcagccgcttgtaaatatcctgaggcgaacgatggtctttaactgccggaagttgacttaacaactcctttatctgttcttcgttccattctgacttcatcatccattagctcctccctcaaaagctccatatgtttccgaagtactttgagccctctgtgttgggtcgtttttactttgctttccgagaagcgcagagccttggctgtttcctgtattgaatatccctgaataaaccgcaagataatcacagctctttgatcgattgtacattgatcaagcgcagcataaatttcccggacattttcatgttgaaccgcaagttcgtccggcagcaattgctgatccctgacatcctgtgtatcccagtcaaatgtaccgagtatacgctgtctgattgtttgctgtttacggaaccagtctatcgcaacatggcgtgcgatagacaaaagccatgttttttcactgcttcttccttcaaacgtatgataagaatttaatacccggatataaacctcttgaagaaggtcttctgtctggtttttatcctttaccatataaaataaaaattggtacaaatcttgatgatatgtatcatataataattgaaaggtttcttccatttgaaacccctccgttcacttttttgtcgtatgaatagcttgaaaagttacattacaactatattacgagtaactggaatttggaagggaatttatattaacatatccttaaattttattaatgttggctattaaaaaaacacccgctcagtcagcgggtgtttcttatggaacaagattcttcggcaaattcagactcgattttaccgttttgtcggaatataaaaagaaaatgttgttcctttatctattcggctgtgcacagtaattgatccgttgtgggcttccacgatatttttaacgatagccagccctaacccggttcctgctctgccccttgtccgcgctttatctgccttataaaaccgctcaaagataaatggcagatcttcttccggtatgccagacccggagtctttgatatcaattttcaatccatccttcacagaatggactgaaatggagacactgccgccggctgaagtatgccgcagcgcgttatcaatcaaattggtaaatacctgctccatcttgtcttcatcaaacataaattcctcttctgtgagagaaatgtcatgatctaaagcaatatttttttctttcgcaacaccggaaaacttccgaatgatcttttctaaaaactcattcacattgattttttcataatgtaagcctgtatggcctgattccattcgggctaaatcaagcaaatcattaactaaacggcccattcggagcgattcgtcataaatgatttgggcaatttctttccggtcttcttcagagcttgcaatgtcatcgacaattgcttcactgtatccctgaagcatggagatcggtgttctcagctcatgactgacatttgcgataaagtcctcccgcagcttatcaaggcggcgttcttctgtcatgtcacgcagtacggcaaccgctcctctgacgtgcgattccgcataaagcggcgacatcaaaagcacccatgatctgccttgaagcgtcatctcaatcatttgttctttttcagtgctgacagcgttttgaaacagctcttttgcttcaggcggaagattgtcgccttctttgatattcatgttctgttcataataccaagcctgaagaaaacgttcagccggcgggttggtcacaagaatcgtaccgtcaatattaatggtaataaccccgtcagccatactgctcaaaatgttagaaagctgctctttttcttgattgagcgcattgatatgaaagttaagctgccggcccatttgattaaaagcggtcgccagttcaccgatttcatcctgagttaaaatcgggatttttgtatcgaacttgcccttcgccaaatcctgcgcgccttctctcatttttcggagagggtacgtgaccctgcttgataaaaagaatgcgaaaaatgtggtcagcacaatcgcaattccagcggcaagaaaaatatagcgggtcgtatgttttgttgtatctttaacggcaagcaaagactgggataaaaagaccatgcctttctttccgtctttttcatacgggacacctacaatcaggcgttcattatccgtgtctgtatcgctcagtcccgtccgtttgcttacttttttatggtctttgagagctttatttaagtctttgtcatgctgtatttgctcaaccgtaatagacgacaggcgatttttatcattcggagaataccagtggttcttctcatcctggatgatggcaatgcttgttaagttatcagcgagttcccaagtgattgaccttgccagtgcctggtcctcgtgattttctaggatgacagcaactttattcgcaagctgtgttaaatcattctcagcttcttccacatggtagttttcaataaactccagcaaaagaaccgttaaaatgaacaatacgatcaagacgagtgaaaggatcgtaaaccacagcttgcctactacgcttttccaaaatttcattcagcgccgacctcaaatttataacctacaccccatacggtgacaatttttttcgcagcttccggagataccttgttcagcttctctctcaagcgtttgacgtgagtgtccactgtccgtaaatcaccaaaaaactcatattgccacacttctttcagaagcttttcccgatcatacaccttgtcaggcgttttcgctaagaaatatagaagctcatactcttttggcgtcaggctcacttctgttccatcagctgttacgcggtgagcatcatggtctattgacagatgtgaaaacacgagcacatttttcgtcggtgtattggcattgaaataagaggtttgggatgctcttctcaaaagggcctttacacgcagcacgacttctctcgggctgaacggcttaacaatataatcatctgttcccgcttcaaacccctgcacccggtttgcttcttctccttttgcggtcagcataataatgggtgtcgcttttttttcacgaatttgccggcacacttcaattccatcagtccccggcatcatcagatcaagcaaaattaagtcataattggcttcaagccctttggcaatggcttcatcaccattttcagcttcatctatagcataattttcacgttcaagatacattcttaaaaggcggcgaattctggcttcgtcatcaactactaatatttttgtttcgttcgtttggtccatgttttccccctgctttccttctgttactttcattttatcaaatcgtgagaaagtttgagaactgtgtcgctttcaaaggactatgcataagaatgaagtccggcaagcacaagatttacgaatattaaattaaacataataatagcaaaaccgattacggccagccatgctgacttctcaccgtgccagcctcttgacagtcttaaatgcaagtaagcggcatagaacaaaaatgtgatcagcgcccatacttccttagggtcccagccccaaaatctggtccacgcgagctgagcccaaatcattgcaaagatcagcgcgccgagtgtaaagatcggaaatccgattgatacggccctgtacccaacctcatccaccagatcaagattgacgtttttcaccagcggatgtaatagagcgctgattctttttctgatgatcagacggagagccccatacaacacaagacctgctccaaatgaccaaatgacagtgttcacttttctgcctgagaaaagcgcgggaagatcaacaagcggttccattcttccttcggtcaaaagctctccctgatgcggaccgacaagcgcgggcatttcgtacaccatcacgcttttttctttacttttgtccacccagttaaactccgcttcatagcctgcaagacgaaatgccgatgtgattgcaataaaggcgacggttgtgaccaggataaacataatcgcttcaagccagaaggtctttttgcttggctttgtctggtctacatgcttcaaaagaaagatgacaccagcgacaaagctgatggcaagtatagcttgcccaagcgcggccgttgttacgtgaatatacagccagttactttggagcgaaggaattaaaggcgagatatctgtcggaaacatgctggcgtaggcaatcagcaataaagcaattgacagcgtaaacaggcctaatgaaggcaatctatagagaaaataaagaatgataaacgccaaaacaagcatcatgccaaaagcggtggtgaattcaaacatattgctgacaggcgcatggccgcttgcagcccaccttgtgatgaaatatcctaggtggcagaaaaaaccgacaatagaaagggtgattccaatgttggcccatcggtttggcctgccctttttatctttattcccgcgtatggccccgccgaagattgggacagcgattaaatacacaagaaaggccgcataaagaaaatttccgctcagctctgccatgacatcactcccttttcgcctatttctgtgttttgattaattctttttggtccaccggttcagtcagtccggaatcagccaatataaatgctaaatccttcttcaggccaaaccagtttttattggtatgccctgctaccataactgcaccgtcctgtgagtgcagccaaattcttcgatgctgccagtacataccttgaatgacaccgatcataaaaatggctccgccgacagcaagcacccagagtgtcagatcctttctgactgtaagtccagtaatgtttttcgtttcgacatggtcaaatttcagcttgtatttattattgcctgatccttcgatggtttcttggatggcgacaaagctcttttcgcctttcggtttgtccggcgttatgatattaaagacaaaagccggattgttagggatctttgtttttgtgctcggctctccgtcctgattaaaatagaagtcaggcaggtagctggcgatttccaccttgtaaccgttaccaagatcatagactgaatctggatccagaaggttgatcttcaggctcccaaaggatttttttgtttttttatcaatcagctggaacaccatttggtcaagctgattctctttgtaatccacctggtaaacggaaaaagaatcaaaacgcagcggctgattgacacggatgtcttcttctgttactttttccagcttcggcttctcgccataaacaatttttccttctctcttgtagagtacggcatcagtttgaaagttctttgccactctaccgtccccgactctgtcaatggcatctgcaaatacctttttttccgttttgctgttataggtctctacgctgaattgattgtttttcaaataatattttccgtctgtacccggaattgctgcggtttcgccttctctgacccaaagcgtctcatcgacgtacatgccaggcacaaatctcagcatcgcaccaatcagaaagatgatcaatccaatgtggttgacatacgggccccagcgggaaaagcgtcctttttcagcaagaatgctgccctctttttctctgattctataatgttttttctttaatagagtaactatcttttctttcgattccccgttcagtacagtaactgtttcactgaacaagcgctgccttcttaaaaaggccgggctccttctgacaccttggttttttaacgctctatacaacggaatgacccgatcaaggctgcaaatcacgagtgaaatgccgatcgaggcaatgagcagcaaataccaccaagaaccatataaatgatgaaacccgagcaaataataaagctggccaaacgtgccgtactgctccttgtaataagtatcagcctgtgcgcccggaggcagataggcttcctggggaaaaatggtgccgaacgctgatgcggcaagggttatgacgataagccatattcccaccttaaccgaggaaaagaaattccaaattttgtcgatgatcgttttgttataggtttgcgaacgtcttgcgcttccgtcatatctcatatcagcgagcggaggttgagtttcctgaagagctcttccgcacgattcgcataaaacggttccgaccgggtttatatgtccgcattcacatttgacttgcttcatcccgaagtctctccgggttttatgagattcatataatcgtgtatcatgctttctgtcatagtgccggtcaccaccttgacaacttttccttccggattgatcaaaaaggttgtcggaagcggagatacgtcataggcatcaagcacttggcgatctgtatccagaacaaccgggaaattgactccgtaggatttcataaaattatgtactgctatctttgactccccaacatttacagcgacaatttcaacaccttggcttttaaaatgcttatattggtttgccatataaggaaactcttttttgcacggttcacaccatgtaccccagaaattcaaaaaaacacctttcccttttaagtcactgagctcgatacgtttcccattcgtatcctctaggacaaaattcggtgcgtcggacccttcggatatactctctttgccggcaaatacagcgttgtaaatggtatagccgagtgcgcagattaaaacgagaaggatgccggtccgaatgaataaacgcctttttttcttcattgtccactgcccccttccccctattgcagatccattcaattatatcattgcacgttcatttcacatttcttactttttgaaggttatgtgaaatttagaaagcgtttttaccgtgatccgccagtgctctgagcctttttacttcgtgaggcgtaagctctctggcatcgcccgtgtgcaggcctcgcaggtttaaaaacgcgtattcctcacgcttcagcttgattacctcatgtccgatcgcttcaaacatgcggcgcacctgtctgttgcgtccctcatggatcgtcagctgaataatgcttgtctgctttttcttatccaaagacagcagcttcgctttagcaggcgctgttttgccttcctccagcctaattccgcgctccagctttctgagcagctctttaggcgggattcctttcaccttcgccacgtatgttttgtctatttcatacttaggatgcattagcttattggcgaattcgccgtcattggttaaaagcaaaagaccgctcgtatcatagtccagacgcccaatcggataaatgcgctgcggaatatttttaaaaaagtccgtcaccactttgcgtcctttatcatcttgcgctgcggaaataacgcctcttggtttatataagagaaagtaaaccggctcttcgcgttcaacctttaacccgtttacctcaatctgatcagaaccggtgaccttaacacctagctctgttactactttgccattcacctttacttttccttctttaatcagctcttctgcctttctgcgcgacgcaactccggcatgagcaatcactttttgcagtctttccatgtctttcacctcaagtattatcttacttttttcaaccttaacaaacaagctttttcaaattcctatgccaaatctaaaaaaaacgccgttttcaggcgctcccaaataataacgtaacgatgatgatagatgcaactacgccgattaaatctgcaagaagtcccacctttaatgcatcacccatttttttaatgccgactgctccgaaatacacagtcagtacgtaaagcgttgtatctgtagatccctgcatgacggaagccagcctgccgataaaggaatcgggcccgtatactgcaattaaatcggtcgtcattccaagtgcggccgtaccggagatcgggcggatcagagcaagcggcactacttcagcagggatgccgatagcggagaaagccggttttaaaagatccattataaaatcaagcgcgcctgatgatctgaaaacagttatagcgacaagcattccgactaaataggggataatggaaaaggcaatttctatcccctctttcccgccttcgacaaacgattcatatgtcggaacctttttgatcgttccataaagaagaattccggcaataatgattggaatcatggctaaagacagccagttgatgatttccatccgctcaccttcccttctttttgcggcggtaataaaaataccgatcaatgataatggcaccgattccggaaataagcgttgccaaaatgcttggcccgacgatatctgtcggcgttttggaggaataagccattcggacagcgatcaccgttgtcgggatgagtgtgatgcaggacgtattaacagctaaaaaagtaatcatcgaccggcttgcttccgatcggtttccgttcagctttttcatttgttccattgctttaatgccaagcggagttgctgcatttccgaggccgaagaaattcgccataagattagataaaatatagcccatcgccgggtgatccggcggtatatcagggaacagtttagatataaaaggtctgcacatccggctgaaaatatccaaaagccctgactgctcggcgattttcattaagccaagccagaaaacaagcacgctcatcaatccaaatgagatcgtaatcgcttctttcgcacccttaaacacggcttcatttacatcttgcagagttccgttgcacatcgcaaaaacgagtccgatcacggttaaactgacccaaattatattgaccattttgctccgcctgccgcattcagaaagattgatttaaacgtttcaaaaaattgtttcttcggtttttgatgccgctcattttcataatagatcggcacttttgcgatggttgcatcgttgaacatgatctccatgtgccctacgatgtcagggattttcgaggcatctttttcccatgcttttttcggcttgagcagtgtggtattaatttttacattttctttttcctcttcggtcagcaaataggtgatatcacgtttgataaaagccttcgattcataaaatgtgcctttcagctttggaatatcccctttttttgcaattaaataggtttgataatgctcaaacacatagttaaacatcttcatatggtcatcccaatcattagggtcattaatggtgacggctatcaggtcaatgccgtcctttgaagccgtagagaccagtgtccgttttgcaagttttgtatagcctgtttttcctcctgtgctgtacggataaagcatggtcagcagtttgtttttgtttttccatacgctttccatcgtttccgctttgtatatttttgtgcctgaaatcttttgatagtctttcagcttcatagcatacttagttaaaatggccatgtcataggctgttgaataatgattttcatggtcgtccaatccgtgcgggttttgaaaacgggtgtttttcataccaagctgctcggctttttgattcatcatataaacaaacccatcgaggctcccaccgacatgctcagcaatcgcgacagcggcatcgtttcctgatcttagcatcaggccatacacaagatctttcagcttcactttttgaccttctgttaaataaatggcggagccttctgttctgacagcatttgccgaaaccgtcactgtttgatccattttgccggattcgatggcgaggacggcggtcataatttttgtgatgctcgcgatccgccttttttgatgctcatccttggcatataacactctgcctgacgcaccgtcaataatgatcgcgctttttgcactgacatctatagcagcatgtgctgtattcacatttacggttgcaataagaaaagaaatcatgatcacgaatactgcttttttgaaaatgcgcatgtttgctcacgtccttgtggtggtttgtacaagtttatgcgcatgtccatcagttatgaataacaattatatttctggaagcaaacataaaaaaactctccctgaaaaagggagagtaaacgttatctgattggcgccatgcttgatccggacgcttcgtaatgagccagctcttccctcatcttcagaaaggccgcgctcaacggcaataataattgctcaagcgacgcaggaacagcatgataaaactcaattgcgctgaccccggtataagacgcccggctattttcacaccacgtgtcttttttcggcataaagaactcttcaatgcattggtgatacacattataaagtgttttttccgctctggcttcctgaaaaggctcctgcatcaggagacgacggcacgcttctgcgcctccttcacaaaatactgccattcttctcagagtgctaagcacatcacagcagtatcctttttcaataggcaattcagcctgtaaggactcaagcgtcgtttgatttaggtaatcgttcacggtattgacaaccattgataagaattcgcctgttttttgagtctgcgctcgcacaatcgaatgtcccatttcgtttggtatcttcccctcatgtatttgtctctcacattttgcttctttcatgatagcttcttccttatatcttatgatgatgaaaaagcgcgattcattaaacttctattttatatcttcgaaggtttggttaaagttttcaaaaaataaatctgcttcttcttgaagaacgtcttcttccgcattttcaggcagcggcggaagctcgtccagcgttttcagaccgaattgttcaagaaaagtcggcgtagtaccgtataaaatggcccgccccggaccatcggcacgccctacttcacacaatagcgccttcgcgacaagactgtgtaaaatccgctctgattttactcctctgatttcttcaatttctgctctcgtaattggctgtttgtatgaaacaatggccagtacttctaaagatgcttgagaaaggccctttgacggcacttcaatcagttttttcaagtaaggcgcaaagtcttttttggtagagagcatgtacgtatctgcatactcaataagttcaatccctcgtgtatctccgcggtattcgtccgccacatccgccatgatcgtgttcagttcaggctcttcgatttcaagcactgttaacagctgcttttttgtaagcccttcatcgcctgccgcataaagaagggcttccacaatagctttccaattcacgatatcaagccccatgaatggattcactccccgtaatgtaaatatctgaaaaattgtgctcctgttcaatgaggaccagctgatttttcatcagctcaagaacagctagaaaggtcactactaaatgttctttttgctcatatggaaacagatccataaagttaattctcgttcctctagatttcaagctgtgcacgatttcgttcattctggcttcgattggtatgtcctgtcttgtaattgttgtttccatcggcctgtttatttttttgcgtttcagcactttttgaaaagctccgatcatatcatagaccgtgacagagagcttttgctcagactgttttacttcttttgcatattcactcaaatcactcggcggtttcgtgaacgatttttgtctttcttcttcccgttcttttaaatccttcgccgcatctttatattttcggtactcaatcagcttttcaatcagttcctcccgcggatcttcttcttcaagtaattcatcttcaaaaagctcctcctcttgcttcgggagcagcattctgcttttaatgctgagcagcgtggcagccataaccaaatactcgctggcaatgtcgagctcaagcacgcgcatcgtatgtacatataataaatattgttcagtgatcttcgccacaggtatatcatatatgtcaatttcaagacgattgattaaatgaagcagcaggtccaatgggccctcaaacgtatcaattttcacttgatattcttccatcatctcaccattttcaagtatcactctcattgccggaaaaactggctaccctatagtataagccaccaaaaagctctcgtccaatactatttcatatcctgttttgaaggagtttgtacagaatattcaaaacacaagaggtgtttgctcggagcgcagaagcgggagaaaaagcctttgcttctggttttcctttctaagaagcactagaggccgggcgttcttttttccttttatcccttctatggtacactaaaagcacattaaaggaggaagcaccttgtatccgaaagcttatatagattatctcgttgagtttcatgcgacacgggattattttgaatgccatgaaatattagaagaatattggaaggaagatccgccaaagaaacgaaaacgctattgggtgggctttattcagcttgcagtggctttatatcatcacagaaggcagaatacagccggggcaaaaagactgatggcgaacagcatccggattcttcaagcagaacaccgggcagtcgaagacttagggcttgatcatggccgtttgctcgaacttatgcaatcggtttacgaacaaatcgaaaccgtctctgcctataaaagcattatactgccaatcaaagatgagaaactggaggaagcatgcaggatcgaatgcaggaaaaaaaaagtatacatgggggcagcccagtgcactcagcaacatatttcttatcgacaaacaccgtttgcgggatcggactgacgtcatccgtgaacgtgaaaaagaaatagaacgcagaaaaaaaagcagagactgatcacagcctctgcttaattattgtatgaaatgtcttgatcctgctgaccttgacaacgttcgaaaaagctctgcgttaattcatttggaaccagtacttgcgttttgaataaatgctttaaagcatccatcatctgttttccgattccttgatggcgatgagaaggattcacactgatatgccggatctcaacctcagaatcctttttttcgactccgattgctccgacgatatcctcgtcctctttccaaagaaagagctggcggtctgtatccgtttcgtagtccttaattgtctgctgaagctgcttaaggtctttttcattcggcataaacgaaagaagccccatcgcaatcttttcaaacgattttttataacgaattaacataaaaacccctctatatccaaaatgtccagtctgctattaacggatacgaataggtgatccgttttctcacattatatcattttcgccatatttttaaactgttttcagcaaattattcaaatgagcggtttaaatttgccatttcaatggcagaaacagcacaatctacacctttgttgcccgcttttgtgccggcacgctcgatagcctgttcgatgttttcagttgttacaattccaaagatgacaggtacaccagtagtgtttgctgcttgcgcgatgccttttgcagcttcattgcagacataatcgtaatgtgtcgttgcgcctctgatgacagtgcccaatgtgataatagcatcatatttttttgtttccgccatttttttcgcagcaaacggtatttcaaatgcgcctggaacccaagccacatcaatgtcatttgtgtctacgccatgtctgagcagcgcatcttctgctccgctcagcagcttgctcgtaataaaatcattaaatcttcctactacgattccgattttaagacctgtaccaactaaatttccttgtatgatattcatatgattcccatccttttttgtgatatttgtgattagaaatgaagtaaatgacctagcttgttcattttggtttgcaaatattttttattgtgttctttcgcctccatttgaagcggcactctttctgaaatactgagtccgtagccttcaaggcctgcgatttttcgcggattattcgtcaaaagcttcatattccggacaccgaggtcgcgtaaaatttgtgctccgatgccatagttgcgaagatccggcaagaatccaagcgcctcattggcttctacggtgtcatagccttgttcctgaagcttataagcttttaatttattgattaaaccgatgcctcgtccttcttggcgcaagtacaggagcactccacggccttctgcggcaatttggttcagcgcggcgtgcagctgcggtccgcaatcacagcgatgagagccaaacacgtcacctgtgagacattctgaatgcacccggaccaataccggttcttctccgaacggcacatctcccatcacaaatgcgacatgctcttttccatctacctcatttgtgtatccataaaccttaaatgtcccaaaatcagtaggcagcgtaatgtcaacttcacgctcgacaagtgttgtcagattgtaacggtattgaatcaaatccttaatggtgatcatttttaattgatgctttttcgcaatttcaatgagctcaggcactctcgccatcgttccgtcttcattcataatttcacaaatgacgccggctcctggagatccgcaagcttcagcaagatcaacagcagcttctgtatggcccgctcttttcaggacacctccttttttcgcaatcagtggaaaaatgtgccccggacgctgaaaatcagatggcacggatttgctgtccagcaatgcttgaacggtaaaagatctttcttgagcgctgatacctgtcttcgtttcacgatggtctatgcttacggtaaatgcagtgtggtgagagtctgtattatgctcaaccatagggtgaagatcaagcctgtctgcgatttcctcactgagcggcgtgcagatcagtcctctcccatgtgtcgccataaagttaatgacttccggcgttgcatgctcggcaagagccacaaagtctccttcattttctctgtcttcatcatctacaacgatgatgacttcgcctttttttaaagcgtccagtgcttcttctatcggatgaaacatgcaaatcttcctctctaaaagccgttttcgcttaagaaggcttttgtaatggtttgttgggtcttattttcattggctttatgcaaaaatcgatacatatattttccgatcatatcgcattcgatattcactttagagccgatcgttttttctgaaaagatcgtttcgctgatcgtatgcggtattaaggagatcgtcactgtgtcttctgtcaggccgaatatggttaagctcacgccatccacagtaattgatccctttaaaaccaatgtttttgttaatgacgggtccatttttaaatcatagtaaactgcgttgcttttctcttcaattcgtgtgatttccgcagttccgtcgacatggcctgagacgaaatggcctccgaaacggccgtttgccgccatcgctctttccagatttactttgcttccttttgttaaatcattcagtgacgtagctttgactgtttcaggcataacatccactgtgaattgattttttgtaaaatcagtgacagtcagacaaatgccgttcactgcaatgctgtcgccaagatgaacatcctctaaaatctttgagcatttaatagttaaggccattgcatgccctgcttttttcatggattcgattgtgcctgtttcttcgataattcctgtaaacatggtcaccatcctattcctttgtcggttttgccgtcagtttgatatcacggccgatttgggttatatcagtgaattgtaataaggggacatctttcattgattgaaaaccttcaccggagattaagctgggagcatgcgttcctccgattagtttaggggcaaaatagaagatgatttcttgaaaacagccttctttgacaaagcttccgtgaacagctgaaccgccttccacatacaccgacatgatgccttcttccgctaggatcttcaaaacatcaggaatttgaatgcgctcggtttcaagtgtaaatatgttcactccgaaagctgaaagccgttttttcttttcctcgtctgcgcgtgccgtcgtaaaaatccatgtcggcgctatttgatcgcaaatcactttagcgtcctcaggaatcgagagtacggtatcaagtatgacccgaaccggctgttttgttacattcggcagtctgcaggttaagctcggattgtcggctttcactgtgccaactccgactaaaatgctttggtgtgttttcctgtattgctgagcatcctgtcttgcagcctctgacgtgatccatttgctgtcacccgtgctggtagctatcttgccgtcaaggctggcagccgcttttagcgtgacgtacggaaggcctgtcctcataaagtgcagaaatttttcattcagcctctccgcctggtctgccaggatgccttcccttacctcaatgccagcttctttcatcatgctgatccctcttccagccacaagcggattaggatctctcatcgccacgaacactcttttgataccagagttgataatcaattctgcacatggcggtgtttttccgtaatggctgcacggttcgagtgtaacgtaaatgtcggcaccctctgcatgtgctccagccatatggatggcatgaacttctgcatgagcttcaccatattttaaatgggcgcccattccgacaatttgtccgtcctttacgacaacagcgccgacgagcggattggattcggtctgtccttcgccctgcttcgcaagatctaaggccagcttcatataatactcttccatttgtttccctcccctcttttgttatttaccgtcaaaaaagccccgaatttataaaaaattcggggctttaggtattttacgcaataggaaataacactatgcatttttaaacattttgcatagcggctcatcatccttctcccatccagactttcactgtcggcttcagcttaaactgaatccaccgcgtgcttatgcacacgggtcacgggctctaaagcaaatgtgctttactaccgccggtcgggatttccaccctgccccgaaggatacaatctttattcatttgtccttattggttattatagcgatcctttttaaagtacgcaatgaaataaacttacaatttgagaaaaacaaaacatcacccttcgatccgaaaggtgatgttttttaatcattcacttttgcaaccttgattaatccgtcgatccgctttgatttgctgaagtaagccttaatcttgtcaccttcttttatatcagataaatcctgatttaatttttttccgttgaagatgattttcgttccgttttctgctactccatgatactctgagccgtcaattttcgtcactttatattcctggatggtgtattcctcttcttccgaggacaaggtttgtccaattgctgtcggaacatccttcagctcaatatcatttatgtacatataaccgcctgcaagtaaaagcaaaagcactaacagaatggtaatcttggtttttattcttcccatttctaaacctccagccaatatgaatctattcattcatatgagttattcctttttttcatgaataaaaaaccgtaaattctcgtaaattattaatataacgatgcataacgggaatatgtttcacatttctgcaaaaatttcttttctatagatatacgaatttatgttctgtttttaggggatgaccgtaaaaaagatataaaaaaagcagccccaatgggaagctgcttgatcctaatttgttttgcgcatttcgttaaacgggtagaaaacaaactttgacgtacccgcaatttgttttttcgtgaagaggccaaggccgttacggctgtccatggaattgcgacgattgtcacccatcacaaaatacttgttatcaggcactttaaccgggccgaaatcatcggtcaaatggtcaaaaccgtcctgtttcgctctctttttattagccgccaaataaggttcgtccacctttttcccgttgatatagagctggtcatttttcatctcaaccgtatcgccgggaaggccgataatacgtttgacatagtgaacatcatctccgtttaacacgacgatgtctcctctatcaaactcgccgatgtatttgactgtcatattaacaaaaaccctttcacggttgtgaagtgtaggatacatagagtcaccatcaacgacatacggcgcaaaaataaagttgcggatgagcaaagcaagaacgacagcaatcacaattgcttttgcccattctaatattgactttttcttcgaaacattttctgatttcaactgatttcctccaataaacaacggtcttcaatttatgttatcacgaatcgaaaaaaaatcccattaggaccattgaagtgattttacaaactgttaatcttcatcttctacccacatcatgcctattttttcttgtcgatcataactaggcctgaaaatattgaaagaaatgaatcgcataattcagaagcgatggactcagaagaaagagagttctcatatgcaaaatctttagatcgtatataaagcatgaggttacgggcagtttgttcatttactgcattccattgatctcccagtccatgatacccatggcacttgacaaaacaattaacgtcatgaaggttactggaatgtttgcggcaacctatttcacaggtgataaccgcaccccgttttttgctttcataatatgtttaaaatcattcaagctcgaaaacatggatcagcctccaaaaaataaatccaatatattcccggcagttgaagactctttattataaaactctgaatatccgcagttcttacagtaaaccactagaaatcggttatgctgcacgtcaaacagctttgataatcccgtgccggttgtagctatttctttttgtccggcttcagtactaccgcattttatacagcctttgttgttcatatcgcgatctccttttcattacatcacgtttgtttgatttattttactacaaaatatcaatcccaatgacccgtactactttaaagtttacttaattttgattacatactaattgggttcgtttctcagcttggtaaatcttctggagaaacggaaaagctccatgaccaaaacattcaaactcagccaaacaccgccgaaggcgtaacccgcagcaacatcactcggatactgctcataaagtacacacggctcagcccgatgaggaataaaacgataataaacaaaaaaatgcaacagtttgcagacgcgtcttgtgagaatgacgaacaaaaagataagcacaaaaaccaaaaatgacaaatgccgttaaagtctgttcgctcgggaatggatataatacatgactttccaaaggagcgtgaacaggatgaagggaatgaaagagccgtctgattccctcttcataaagctccccaccaatgactaggaaaaataagaaagagagttcgattttccgatcttgccctctgaataccgtccaaaaaaaagttagaacaataacggctaacagaacacctctcgacgcaaaagctttctgaattgcagctgggcccagtctatacccgatccaatacgacatgctcactcccacagctccccaatccggccgctaacatgcttagcacccagtttaacttttcttgaaacacgagaacaccggcaaactctcccggtccaagtaaagctagaagctctaacatcaagacaataaacaagacggcatatccgtactgttcgagcaaccccgtcaaaacttgcatgtgattctccttaaacttttttgttcttttatcattcccaatccactttttgtataatcagcacaattttatcttcagtcgtccaacaacattgtctatggcgggatcttctctcatacattcttttttgacataggaggagcaatagcatgaaatgggaggaaacaaaagatacgcagggagtttgccaaaattttgggcagttcgttctgccaccgagtcaggtgtttgtttgcccacctcatcccttgtcaattccccatttttcccgtttgaggttcgaaatggtaaagtatttcacttagtttcttacatgaagaggtaaattctttgctcaccgaactaggatagcggcgtatggcgatttctacattgcataaccactggttatttagtgagccgtgagcaatgtatatgcactttgagtcagcacaggatgatcctattacattcgccagaaaagcagctgccgcattcagagtagttaaaagaatagacagatatctgggcttccggaagctttaaaggaggctcttttttcgagcatttttataaatcaataaaaacaggcatctcctaaatatttttgccgataagtttacgctaatcaactctagcactaatacatataaaaaatagaatgatatgaaaggagacttgatagtatgattgattatcctattaatataaacaacgtttccgggaacagtgtaattaacgtaggcggcgcttttatgatcaggcctttaactttgtccaaatctgtgtttggctccggaggtttaaacacaggaattgtctttgaaaataactttgtaagcaaagctaaaatgattaatcatcaatttactgatcaaaacgtcaccaaaactttttaatgtattcaatacacgggggtcactaactaaacacctggttttgccaaccgccatcagcattcggcggttttttattgaacatttttggccaataaaaaaagcttcctctctaagaggaagccttttgcctgccgattagccttctacacgaacttctttcatgacatcgccattagacatgtttttcgcgaattctaatccgcttgttactttaccaaatacagtgtgaacaccgttcaaatgaggctgtggctcatgaacgatgaaaaattggctgccgccagtgtcttttccggcatgtgccatagaaagtgcgcccgcctcatgtgtatgcgggttgccttctgtttcacatttgattgtgtatcccggaccgcctgtaccagttccgtgcgggcatccgccttggctgacgaagccagggatcactcggtggaatgtaagcccgtcataaaagccttcgttcgcaagcttttcaaagtttgcaacagttccaggtgcagcttcaggataaagttcaaattcaattttgttcccgtcttctaataaaaagtaacctgttttcaattgtatgcctactttctttattttaattttcaaaggagattatgtataggttatagcctgtctctccttgtcgcggctattataccacacctttcgggggaaaacgaatctcccgagctttactaaaaaataaaaatgaaacctgaatctctttatctccgtctaacctaacggaactgtatttttcatgattcaggtcctcacaaagcagcactatccagctgcttgtgaaattgaaggaggtcaaactgctttgaagaaaatttggattggaatgctggcagcggccgttttgctgctgatggttccgaaggtcagtctcgcggatgccgcagttggagatgtcattgtaacactgggtgctgatttgtcagaatctgacaaacaaaaagtgcttgatgaaatgaatgtccctgataatgccacaacggtaaccgtgaccaataaggaagaacatgaatatttaggaaaatatatatcgaacgcgcaaatcggatcgagagcgatttcttcatcgtcaatcaccattgccaaaaaaggctccggattgaatgttgagacccataatatcagcggcatcacagatgaaatgtacctgaatgcactgatgacagccggtgttaaagatgcgaaggtgtatgttacagcaccgtttgaagtatccgggactgccgctttaactggattgattaaggcgtatgaagtttcttctgacgaagcgatctcggaggatgttaagcaggtcgccaaccaagagcttgtcacgacatcagagcttggagacaaaatcggtaacgaaaatgcggcagccctgattgcaaaaatcaaagaagagtttgctaaaaacggggtgcctgataataaagctgacatcgaaaaacaagtggatgacgcagcttctgatttaaacgtcacacttacagacagccaaaagaatcagcttgtctccctattcaataagatgaaaaacgctgacattgactggggacaggtcagtgaccagctagataaagcgaaagataagattacgaaattcatagaatcagatgaaggcaaaaacttcatccagaaagtcattgatttcttcgtatctatctggaatgcgattgtatctatattcaaataagaaaagcgccgaaaaatcggcgctttcttttattgctttacacccgttttaaatggcagatcaagttttacaatatcttcgtatgtttctcgcttcacgactaaatgagcctcaccgttttcgacaaatacaacggcgggtctcggaatacggttataattgttggccatgctgtatccataagcgcctgtacaaaaaacggcaagaagatcgccttcttttacttccggcaggtcaatatcccaaatcagcatatctccgctttcacagcactttccggcaattgataccgttttgtcatgcgcttctccgatcctgttggctgccgcagcttcatatttagcttggtaaagcgcaggacgaatattgtcgttcatgcctccgtctacagccacatattggcggacacccggcacttctttttgagagccaaccgtataaagagttgtgcctgcgtctcccacgagagaacggcccggttcgatccaaatttccggaatgtcaaaaccgtaacgggaagcattttctttcacagcttcgataattttttcaacgtattcagtggcatgaagcggttcatcatcttccgtataacgaatgccgaaacctcctccaagattcagcaccttggatacaaatgaatatgaatctctccattcgtctagttttttgaagattttttccgctgctaacacaaaaccggccgtatcaaagatttgcgagccgatatggcaatggacacccagcagctgaatgtgttccgattgtaatacttgttcaatggcccgttcagtttgtccgttatgaagatcgaaaccaaactttgaatcttcctggcccgttgtaatgtagtcatgcgtatgcgcttctactccgggcgtgatccgaagaagaacatcgatggagtgacccgtttctttacataggtcttcaagaagcgcgatttcatagaaattatccaccacaatgcagccgatgcggtgctcaagcgccatccgcagttcttccctgctcttattgtttccatgaaagtggatgcgttctgccggaaagcctgctgcaacagccgtatatagctctcctccggatacgacatctaaagaaagtccctcttcctcagcgagctgaatcattgcgactgatgagaatgctttgctcgcatatgccacctgtgctttcagccctgcagaaataaacgcctgcttaaagcttttagcacgctcacgtattaaagccacatcatatacgtaaagaggtgtaccatatttctccgctaaatagagagcatccacacctccgatttctaaatgaccatgttgattttgtctgcttgtgccgtgtaagaacaatgtcattccctctttctccgcttatggatgaaaggacagttttatggactgtcccttcataattaagacatacattatcatactcttcagtcagtttcaatgcgattatgaattggtaggctgccttaagcgatttttggggtgaacgatgctgggtcttacttttgcgccaggtttcgctgtgcggacaagaacctgccacagcgcctttccgttaaagggaatcagcggccataagtacggtgtctgaagggatttgatgcttgccatggcaataattagcactgtaaatccgatgacgagcccttttatatgaaataaagcaacgagtatcatgaggacaagacggctcattttgtttgccaagcttaattcataactaggcgtcgtaaaggttccaatcgccgcaagtgagacgtacagaatcacctcaggagaaaaaaggccgacctcaatcgcaatctgcccgatcagaacagcggcaattaaacccattgctgtcgataaagccgtcggtgtgtgaatggcagccattctgagaaactcgattcctaagtcagctaaaaatatctgcaggatgatcgggatatgcgtatctttatttaaaccgataaatttcatgttgtccgggagcagatcaggctgaagcacaaagagaaaccagatcggaagaaataaagtagaagcaagaataccgaaaaatcttacccatcttaaaaaggtcccgactgaaggcgcctgcctatattcttcagcatgctgcacatggtgaaataaagtcgtcggggtaatgatcacactcggcgatgtgtccactataatgataacatggccttctagaacatgatttgcggccacatccggtctttctgtatagcgcacgagcggaaaaggattatagctttgattaacaatgaattcctcgacagttttgtctgccattgttaatccatcgacatcaatggatgcaatttctttttctacgatctcaaccagatccggatcagctatatcttctatataacaaatgcttaaatccgtctttgaccgctcaccaactttagtcatcttgactcgaaggcgttcgtctctgatccgccttctgagaagggccgtattgacgacgatattttcaacaaatccgtctctggctcccctgaccaccttttccgtatcaggttcttccgggtttctgcccggatagcttctgacatcaattataaatgcgaagcctgcaccttcaacaatgacagcgacgagcccggacagcacttggtcggtggtttcatccaaggtttttactttttcgacctgggcgttaagcagcctgttttcgacgatgtcgaccagctcatcagggtcttctttccgattgttaatggcaacaagctctctcattaaatgaataatataggctgtatcgcataatccatttagatagtaaagctggatctctttatctaaaatcgtgagcttgcgaacacctacatcatagctcgtccccatcccaacacggtttttgaaatactcttcatttttagctggattccgataaacccgaattttctcttccttgtggtccggcatgatacccgctcctttctaaaataaactcgaccgctttcatggtgattggcgacccttttgagatatcgtcttttctgcccattttgccgatatccccgataccgacaataagcgggagatcaagtttatcaaggcaatagactgtatctccactcattctgtggtcatcaaattccctttccccgactttatcgacgccgtattcagttatttctccattgcggtcaatgcttacatcgaccctggtccattcagcctgatgtgtttttgacgcgaccgcaatcacaccgagcacttcaatagacggatgggttgcgacataggttagagcggcttctcccgggccctctccttgaaggccggagtcgtcaaacatgacaaatacaggatcatacggtgctgaggcgatcagcttgacaagctcggcgccgctgcgggtggaaggattcccttttgattgtgaaatacatcggcctcccactttgcttgcggcgtattcaattgttttagcggcataaacatccccgtctgttaccagtatgaccttgcgttttgtcgtcatgtcggcattatcctttcggtttgaaaataacagctacgataaaggcgaaaagaatagcggctgagataccggccgaggtcagctcaaaaatccccatgccgattccgataaatccgtgtatatgcgcctgatgcatggcgccgtgcagaagactgtgaccgaagctgacgatcggaacggtggcgcctcctccggcaaattcaataaatttatcgtaaatgccgaaaccatctaatattgcaccgattacaacaaatgatgtcatgacatgagctggcgtcaatttaaaaatatccaagagcagctggccgacgatacagatggccccgccgcagacaaaagccaaaaggtagtccatattaagatgcacctcctgcacgctcaaatacaaccccgtgggcgatagtcgggatggtttctttttgctggatcatcgtcgggcttaatagcgccccggtcgccacgacaaatacacggtttagttttccttctctcagctgcttaaaaatatgagagtaggtgacaaccgctgaacaagcacagccgctccccccggcaaagacctgctgatccggagtgtaaatcagaagcccgcaatcatcatgctttgtgccgactggatatccatcttcttttaaaatgtcttttacgattggagaaccgacgcctgacaggtcacctgtcaggattagatcatagtcatccgctgtccggttgagatctttaaagtgctgcttaatcgtatcagctgcagccggagccatagccgatcccatatcaaaaggatctgtaattcctaaatcagaaaccttcccgacagtcgcacttgtgatttggatatcacccggtgtctgactgatgacaactgcaccgcttccggttacagtggaggtagcagtgtccggtttttggcctccgtattctgtcggatagcgaaactgtctttccgcagttgcattgtgactgctggtggcagcgagtgcccttttggcaaaccctccatcaactaaggctgatgcgacagccactgtttccattgatgttgaacaggcgccaaacatacaaagaaatgggattttcaagtgtcttgccacatagttagccgtcacgttttggttcagcaagtcgcctgccagcaataggtcaatatcatcttttgtcagattgtttttttgaagtgcaacattaacagcgtcttccatcagctgccgttccgccatttcccagcttttttgattacaatgcatttcgtcataggttttatcaaataaagagccaagcggtccgtctttttcctttggtcctgctgccgttcccgctgagttgacaaatatgggatgttcaaatacccaggtttgctttcctgttaatttcattttcttctcctcctatgacatcagtttctcaaaagcaaaccgaatcattccaacgatgtatgcagctacaactccgaaaacaataacatttcctgccagtttaaacatatttgtcgctactccaagcactaatccttcgcttttatattcaagagccgcacttgccatactgttggcaaaacccgtgacaggtacggctgaacctgcgcctgcgaattgtccgattctgtcatagattccaaaccctgtaagcagggcagaaattaatatcagcgttgcagctgttggattccccgcagttttttcattgaaatcaaaaaaatggatataaaaattttgcagaccttgcccgattgcacaaatcagtccgcccactaaaaaggcttttacacagttccagacgtaaggcggcttaggctgatatgttttcacttttgatttgtaattttcttttatgtttgtcatcttgaaacctccttatgaatggtcaataaagtacagccagtgaaataaagatcccgcgattttcccaatcacgatggccattaacagaataatgattttacttctgagcccgattcgtttcgccaaaatcggcaggacatttaaaacctctgtaagagcagccgctagcatcccgacgaacaaacctgccagaagcccgaccggcacagctatccattttgttagataaagatgattcatatgaagcgtctcccatcccccgcaaaccgcgccaagaataacagccgcttcataagcctgaacaaatctcattgttttggtgagctgcatcagccgcggaatgattcccattacggttaaaaaagcaacgaaacccgcccccaccgttatgcctccgccgagcccgacaaaaatgatgaacaatacactaacgatcatgcagatcctttatggtttcttgattctcatgcatggccacatattgatcgagatcaagctgatagttaaacatctcaacctccagcgggctgggctcttcatttaggcgctttttaaatatgtggttaaaaaacacgatcatccccagtcccaaaccgatgctgtatgggatttgaagcaaatatggatagtcattcctctctccggttatgatttcatatagtgcgatatgaacatctctcatgcttacatcctcatgaaagttcatgatggcaagacacgatccaataaacagaagcagccagacaccgataaatagaaccgttgataaatttcgctttcgatactgaatttcaacaatggtttctgctccgcctacggtttgaacatcaattgtcgggtcttgtaaatgaatggctctgaggacttgtatgatatccagaattacgatatttttatctttttcgctcacctgataaagcggcatagccgaaagtttctttttcagctgaagctgcccttctatttgcgcggcatctccaacggtaataatatcccctggatgtgccagcactcggtggcgaagccggataaatattcgtcgttccatcattgatcaccatctttcggtggttatatatgtagtatgtggttcgattttgttctcattcatccgctcgaaaagaccataaattaccacgcttttgcacaaaaaagctagcctgcactgcagactagccatccgtatgatccatttgaaccttgatctgttttaatattttcttttcaagcctggaaacctgcacctgagagatcccgagccgctcagccacctcggactgtgtctggtctttataatatctgagatagacgattagtttttccctttcctccaaatcgctgatcgcttctttcagcgcaattttgtcaaaccatttttcttctgagttgtcagcgatttgatcaagcagggtaatcggatctccgtcattttcataaacggtttcgtgaatcgaagatggagcccttaccgcctcttgggccagtacaacatcctcagcttcaatctccaaatggtcagcgatctcctgcaccgtcggcactctgcccagtgttttcgaaagctcatccttcgcgcgccggattttgtttccaagctcttttaatgaccgtgatacctttacggttccgtcatcacggataaatcgttggatttctccgataatcatcggcactgcatacgttgaaaaacgcacatcataggttaaatcaaatttgtcaacagattttaacagcccgatgcagccgatctggaagagatcgtcaggctcatatcctctgtttaaaaaccgctgtacgacagaccaaacaagacgcatgtttttttctatgaggaggtctcttgcctgctggtcgccattttggctttgtttgattaattcctttacttcatgatccttcagctgagcgtttttgccgtttttcttaacctccacatccataacaaatctccttaattacaaagcgctttgctttttgataagtgctttgttaagcgaatcgttgttcccatttcaggcgatgaatcgatactgacatcatccatgaaattttccataatggtaaagcccattccagagcgctcaagctcaggcttagtcgtaaatagaggctgacgggcttcttcaagatctgtaatgcctaagccttcatcacgaatagtcatatatacgacatgatcttccagcgtcactgaaatgtaaactttcccttcacagttctcttcatatccatggataatcgcattcgtgacagcctctgacacgactgttttgatttcagtcagttcatccattgtcgggtccagctgagctataaatgaagcaactgtcacacgggcgaacgattcattctgactgagggcagaaaactcaaggtgcatttcatttttcatgatgccacccccagtgtcaggagtgcctgctgttcagattgttcaaatcggataattttaaacagacccgacatatcaaacaatcgcttcaccgcaggagagatagcgcaaacaaccatttctccgccaatttgcttaatttgcttgtatcttcctaaaataacgccaagccccgagctgtccataaaggaaaggtcctccaagttcagcacgatatggcgaatatcatccttctccaatgattgagtcactttttgcttcagggtttcagccgtatggtgatcgagttcgcctgttaatcgaatacaaagcacagattctttgacattcatgtcaattccaaggctcatgctcattcctccttgatatgatcggataatgagtgtttcgatttcgacggaatgaattccttcaccgtgacaaaactagtggtcattcggcataattacttaaattttgtccagtctcccatcgtccgctttaagaatgtgataaacccggctttcttcatatcttcttttgcagcaacaggactttcagcgagtacttctccatcctttttcagaacaagagtgccaagctcttggcctttttgaatcggagcactaatattgtccttcatcttgatttcttttttcacatcgttcatatcctcgccttttttcgtcaatattgaaatcggctcagatgtagtgagttcgataaatttttgtttcccttttttgacctttacttttgctactgtttgatttcgtttatataaaggatgcgtttcatattggctaaaggcgaagtcaagcatttttgtcacttgcgcgtttctttctttaggcgtgctcgctccgaatacaaccgctatggcccgcatgtttccttttttagccgaagcagtcagacaatatttcgcttcgcctgtatagcctgtttttacgccgtctacaccaggataaaatttgataaggcgatttgtatttacaagccaaaactttttatctgtattttcacgcagataatcttcatacgtgccggtaaacttcgtaattgattcgtatttcaataattccttagccatgattgccatgtcataagcagagctgtagtgtccttcctcggtcagtcctgttgggtttttaaaggatgtatttttcaatcccagctcttttgcttttttattcattttcttcacaaattcttcttcagagccggaaataaattcagccatggcgacggaagcgtcatttcccgaagcgattgcgatgcctttcagcatttctttgacagtcatttcttcgccgggctcaaggaatatctgtgagccgcccattgacgccgcatgctcgcttgtacggaccttatcactcattttgattttgcctttatctaaagcttccataatcaaaagcatcgtcataattttcgtcatgcttgcaggcgccagtctctcattgctgttcttgttgtaaagcacttttcccgtgtcacgttctatcagcaccgcagacttcgcttcatgagcaagctccgatgtacgttttccgtcttgttttgcaaatgcagacggtgcaaatgtaagcagcattataccaatcaacaaagtggataaaagacgtttcatctcaaaagccctccatttcataatcctttttattttttccaagcgtgatggttttatacgccactgatggaaaatgtttcgaattttgggcataaaaaaagacagctgtgtgatatcagacacagctgtcttttggtcctgcattgattcatatttattcgtactgagcgacgatcgctttaacaagctttaagaatccagcttttactttttcggtcacttccataacttcatcgtgacttaaaggctgatccagaattccggctgccgcgttagagatgcaggaaatgccaagaacccgcattcccgcatgattcgctacaatgacttccggaacagtagacatgccgactgcatcagagcccatcgttcttaagaaacggacttctgccggtgtttcgtaagaaggtcctgtcacagcagtgtacacgcctttttgaattgggatattaaggtctttcgcaatcttttcagccaggctggacagatctttgtcataggctgaagacatatctggaaatctggcgccgaaatctgcttcgtttggcccgattaacgggtttgttcccataaagttgatatgatcggtaataatcattaaatctcccgcacggaattcagtgttgacaccgcctgcggcatttgtcacgatcaacgcttccacaccgagcgctttcatcacgcgtacagggaatgtgactttctccattgagtagccttcataaaaatgaaagcggccctgcattgcaatgacggaaactccttcaagagtgccaagcacaagctgtccggcatgcccttcaacagtagataccgggaattcaggtatatcttcatatttcagcttgaccggattttcgatttcgtccgccaaaatgccaagacctgagcctaaaataaggccgatctttggagattccggcaggttttgtttaataaaagcggctgcgcgttcaattctgtccttcaagaaacagtccccctattgtaataaagataaaaagcttttcccgtatttcggtttatttgtttggaaattatcagcgatcgttgcgccaatatcggcaaatgtatctgcaagcggcagcatttgcgctttcttatgttttttgctgtaagcgagaatcggcacatactcgcgtgtatggtcagtcccatgatgaatcggatcattgccgtggtcggctgtaataattaacagatcgtcttctctcattttttcaaacacttccggaagccgcgcatcaaattcttcaagcgcgcgtccgtagccttcagggtcacggcggtgtccgaataacgcgtcaaaatcaacaaggttcgcaaagctcagacccgtaaaatcttctcccagcgtatcgatcaccttgtccattccgtccatattagaaaccgttctgcgtgaagaagtaatgccttctccgtcgtaaatatcagagattttaccgattgaaatcacatctaagccgcagtctttcaattcattcatgacagtgcggtcaaacggcttcagcgcataatcatggcggtttggcgtccgtttgaattgacccggctctccgacgaacggccgtgcaataatgcggccaaccatatatttcggatcaagcgtcagctctctcgccgtttcgcaaatgcgatacagctcctcaagcggcacaacctcttcgtgagcggcaatttgcagaacagagtcagcagacgtgtaaacaattaaagcccctgtctccatgtgctcctggccaagctcatccaaaatcgctgtgccggaagccggcttgtttccaataattttgcggccagatctcttttccagctcttgaagcaattcatcaggaaagccttccgggaacactttaaacggtttatcaatgtataaacccataatctcccaatggccggtcatcgtatctttgccgtttgacgcttcttgcatttttccataataggcaagcggatgttctgttttttctacacctttgatatcttcgataagaccaaggccgagctttgccatattcggcatatgtaatccgttcatatgctcggcaatatgaccgagcgtatgagcgccttcgtcattaaagtcagcggcatccggcgcttcgccgattccgactgagtccatcacaattaaaaacacacgattatatttgtatgcaggcatcttgaaagcctcctttttttctatacgtctattgtatcgctaagaggtctgacaactcaagtataaaccgttttcattcccgttgacaatgtatttggaaataatgagaaacttcaatattttctgtcgctctaaacaaaaaagccgcagccacctgcggctatgctcgcggatgaaactgcttgtacacatccttcagccttgttttcgtcacatgcgtataaatttgcgtcgtggatatatccgcatgaccgagcatttcctgcaccgctcttaaatctgccccgttctcaagcagatgcgtcgcaaaggaatgcctgagtgtatgcggagtcagctctttcttaatgccggcttccaatgcgatttttttcaggttcttccaaaatccctggcggctgatctgtttgccgtgatgatttaaaaagagggcgtcagatacattattttttaacagttttcccctggcttttgtcatatattcctcaatggcggaagcagcggcttcaccgattggcacaatccgttcttttcttcctttgccgaagcatcggataaaccccatagataaatgaacatcagccgttttcaattcaatcatttcactgactcgtatgcctgtcgcataaagcagctccagcattgctttatcccgatatccgaaagggctcgtcagcttaggcgtgtccaataaccgctcgacttcattgagcgcgagcaccttcggaagcgcccgttccgtcttttgtgtttcgatatgaacggaagggtccttatccgttactttttccctgagcagaaattgatgaaaagagcgaatggatgccaaatgccgcgccgatgtcttgccggatttccccgagtccttcaaatgctttaagtattggataatatgtatgcgggtaacgtgattccaatctgtaacatgaagggtttctgttaagtagagagaatagcttttcaagtcacgttcataggatacgatcgtattttgagagagccctctctctaccataacgtagtggatgaaatcctttatttgatctttcactcttgatctactccccgttttggtaaaaaaagatcaaccggtcgaaccatccgcctttttcatcctgatccatttcaacaacttttacagcggagccttccggtttatcataccgatgatagttttcatactcttgattcacccatatcatagcataatagaacaaagcggtaaaaccggtaaacaggatgaaaactttcaatgcatcgacagctgttttcaggaatcttcccatgtcctaatcgatcctttccctatggttccagttatataaaccatatgccaaatcagaaaggttttatacatagaaacagcaaaaaaccctttccccatgagaaaaggttcgcgctcggcaccgtctattcagtttcttttccgttacagcggtggcaaatgccgtgaaacgtcaatctatgatctttaatcttaaatttccaatcacgttcaatgatttcttccacgtcttcaagcaaatcttcttcaatttcatcaacggctccgcactccatgcacaccaagtggtgatgaaagtgagctgcgccctctttccgaaggtcgtaacgggacacaccgtctccaaagttaattttatctacgacttttaattcagttaataattcaagcgtacggtatactgtagcgagaccgatctcaggagatttctcttttacgaggaggtatacatcttctgcgcttaaatggtcttcttcgttttcaagcagcactcttactgtcgcttcacgctgtggcgtaagtttatagctggatgagtgcagttgtttcttaatacgatcaatacggttttccatgtctttccctcctacgccgcattccatgactcattataacaaaatacgcgcagagttccaactataattattataaactgataaataaaatggttttcttttaataatgattttaaaaaagtctagatgtaagcttttccattaaaacaggagataagtatgcttcaaagagagatgaaatcagcgctaaaaacagaatgaccagcagcacaaaggcataccgcccgaaccattgaatcggcgcgtcatgcaggcttcgtttcacgaacagctgtctgattaactttaaagaaaacgcaattgcacatgtgcccataatgagataagccggaatcagcagcacattttgcggcaaaacggagacaaatgataggaaaaacccgcttactcccatctgattgactaggaacccgacagtaaagccgacgacgatccctttcagaaagatcataatgaaaataatcggcatcccaatgacggaaattcccagtatccacatcaggcctaaatactttgcattatgaaagatactttgcccaaacatatcagctgaacttgcctgttttccatccgaaagctgtccaaaaaattgacttaagtagtagtataaatcttctttctggctgatggtcatactgttgacaataatcgcgccaaagatgacacccatgaaaaacagcactgacacaaatatataaagagagagatgatctttgacatgcctgagaaacatgtccttataagagatttttcgcataccgtttcctcccgcccgctctagtgatttgatttaatagattgtatgaaagaaacagaaaaacatgccctttttcaaaaagaaacaatagagatgaatgctaggcggctttttggggcacaaaaaaatccttatcatcaactgctgtatgatcataaggattcttatgcttccgtttattcaaaatctcttttttgctttttgtcattcttccatgtgtgctgaaagatggtgtgctgcctcttgataataagacgtcacgtccgccgtttctcaatcgatgcccccgcttctttttcgcttggctttttgccatgtgatcactcccttttttattttcatagtaatgataacaaaattgaacaatgataagaaaaaaacagcacctgctacgacaggtgctgtttagctacatttatttcactgctgtaagagctgcatgctcgacagctgctgctaccgcatgatggacttttgaatcaagcggctgagggacaacatcaccttgtttagtgcaagctgcgatggcctctgctgctgcgacaagcatatcatgattaatctccgtgctttttgcgttaagcgctcctctaaaaatccctggaaaaccgagtacattattaacagaacgcccgtcagctgcatatgcggcgccagcctgcagtgcggcctccggctcaatttccggcttcggattcgataaagccagaatcacttgaccagaacgtacaaatgccggttttattaaacccggaacgcccgttgtagcaatgacaatatcacatgtttccataagctcctcaatactggaaactgcctgtccgccgtattgttcgagacggttcattgctgactctgatttgtctgttccgtatacagcattcacaccataagccatgaacatccggcagatggccacgcctgctgcgccaaggccgatttgccccactttcgcttccttcaggtcaacccccgcactcctgcatgccgaaatggcagctgccagcgtcactacagctgtaccatgctggtcatcgtgcataacagggatgttcagctcctcttttaggcgatcctcgatttcaaaacaatgcggcgaaccgatatcctcaagaaggatgccgctaaagcccggagaaatatgttttactgttttgatgatttcttcaggatcactcgtatcaagcagtatcggaatgccgctaatacccgccagctgatcaaataaagcagcctttccttccatgacaggcatgccagccacagagccgatattcccaaggcctaaaattgcggttccatccgttacaattgcaacagaattgctgatcgttgtataaatagaagctttttcaggttctttttcgatcagtcggcacacgtccgcaacacctggtgtgtagacacgtcccagctctgccagtgaacggatcggcattttgcttttcatttggatttttccgccttcatgtgcggacaggacttcatcagatacggtgtgaagcctgatcccttctccgagggcctgtacagccgcgatcacttcctgaagctgttcttcattctccacttgaacggtaatattccgcattgtgtaattgggtccgacttttaccgtctccacttcaccaatatccccgcccagaaggccgatggccgtagccacccttccaagatttccgggaaccgaaggcgtttcgatcatcagtgtccgaatcatgtgtttcgctatcattcagtgatcctcccctattagcctagtttttcggctttaactgtattgtttttcgtataccatataaattttcctgtataaccatagataattgcaagacctattgctacaaaactgagccacataaacggcagataagagaaggtagaaacacctaaaataccagccatgtaaatcccattatcagaccaaggaaccatccccgaagtcaatgttcccccgacctctgagttacgtgataacactcttctgtccagatgtaagcgatcatagctgtcttccataattttcggagtcaaaataagagatacatacatcgcacagccgaagatgtttgctaaaaacgctacgatcagtgtagacaatgtgacattgccggctgaagttaatttcttttcaaacgttgaaacaatgacttttaacacgccgagtttctcaagcagaccgccaaaaccaaggccaaagatgatgacgacgagagaatcaagcataccgacaattccaccgcggtttaacaagccgttcaaaaattcaacatccgttttaatagagaagccgttgtacgcagttgcaatcgcatgggcaatatccattccttggaaaacaacagcccagattgcaccgagtaaagcgccaattacgataactggcatagatggctttttcatcgccaataagactatgacgagaactgccgggatcagcatccaaatatgaatgtcaaacgtgttttgcaaagatgattttaagaattcaactttatcaagatcaatatttttcccgccgtacataaatccaacaactgtaaagagtatagctgtaatgacataagcaggtattgataaataaagcattgctctcacgtgagccaatacatcgacttttgatagtgaagaagctagaactgtactgtcagacagcggagacagcttgtccccaaaataagcacctgaaagaatagctcccgctactagaggaagcggaatgcctaacccctctccaattgcgatcatggcaatgccggcagttccgactgttccccatgacgttcctgttgccacagacataatggaacaaataattaacgttgccagtaaaaagatacttgggtgaataaattccagtccgtaataaatcaaagtcggcacaacgcctccggcaatccatgttccgatgagcgccccaactgaaacgagaatcagtacggcttcaaggccatttgatatcccatgtacaatcgcattttgtaaatctttataagaataaccgagtctaatacctaaaagcattgcaataaaccatgaaacaaaaagcgccagctgtatcggcaagtcgagaaagactgtaaacgatagaacaagtgctaaaaatactcctagtacaataataatttcaaatagtgttggcaatcttacatccttcaaaagaagtcccccttcatgtaaaagctaaaacgctttcaatatatagtgcaacacgtatactatacttcctcatccctatgttgtaaacagcttattcatccgactattcggagatgaataagctgtattttatacaaattttatttttctaatagttctttccctgcgatacctggtttggtcatctcatatgggtttaaaataatatccaattcttcttcagtcagcacatcatgctgcagacaaagatcccggacagattgccctgtcataattgcttccctggcaattctagctgccgcttcatacccaagatgcggattgacagctgtgatcacgcctgcgcttttttctacgtattgcttcatacgcttttcgttggcttcaatgccttttaagcagttgtcagtgaacgaacggaagccgttgttcatgatgctgatggattgaagcaaattaaagacaagcacgggctccatgacgttcaactcaagctggccggcttctgaagcaaggcagattgtattgtcatttccgataacctggaacgcaatttggttgatcagctccgccataaccggattgactttccccggcataatagatgaacccggctgacgtgcaggcagagaaatttccgcaagtccggcgcgcggtcccgacgccattaagcgcaggtcgtttgcgatcttcgacatgttcatcatgcagacttttaatgaagctgatacctctgtataggcatctgtattttgtgtcgcatcaacaagatgatcagcgccgacaagaggaagcccgctaatatcagcaaggtgctttactacctgtttgatatattcaggatcagcgttcagccctgtaccaacagcagttgcgcccatgttgacttcatacaggtgctggcgcgattgcttgattcgtttgatatcacgctcgagaacacggctgtaagcttcgaattcctggccaagacggatcggaaccgcatcttgaaggtgtgtccggcccattttaataacagagtcaaactcctgtgctttttgcttaaacacactatgcatatcttccattgttttcagcagtttttctaagagcttcaatgtggaaatatggatagcagtcgggaacacatcgttcgtagactgtgacatgttcacatgtgtgtttggacttaaatggatataatctccctttttatgtcccatgatttcaagcgcccggtttccgataacctcattcgcgttcatgttcatagaagttccggcaccgccctgaatcggatcgacgataaactgatcgtgccacttgccttccagaatctcgtcagcggcttgtacgatagcttggccaattccttcatacagccgtttcacgtccatgttggcaagagccgcagcttttttcacaatcgccagtgcgttaatcatttcctcatggattttgtatcctgtgatcggaaaattttcagaagcacggagcgtctgaattccgtaataaacatctgcttcaatttgtttttccccaaggaagtctttttccacgcgatattctttttggccgtttaacataatctttaaccttctttctctttgctggttatcgtttttacattttacaggacaacgtcatcagctatcggcgtttccataattctcttgacgacaggaagatccgaagactgacctagcgcccacatcaattttggcacaattgcttctgtgttcatatttcttgatcggataattaagtcttggttgactctgcggccaacctcgtaaatgctcatgtcttcgccttcttcaagacattgagtcgtaatgacgacgacaatgccgctttcgatcagttcattcacttttgacaaaatgtctctgccttcaaacggcactcctccgctgccataactctcaatgacaattcctttgtacatgcttttcagggcatcaaacatttcgggctttaagcctggatgcagcttcagcagacatacatctgtgcatagtgaagtgtcaactgtgaaggtgtcgttctcaggttccgttacttgtttgttgtattcgatcccgtcttcattgataaaagcgatatatgggtaattgatgctttcaaatgcgtcgtagcttttcgttcttaatttgatcgcacgcgttccctgaatgactctgccgtcaaacacaacataaacgccgcccacgccttcacaggcaaatcgaatggcatctgtaatattttttttggcatcggttttttggaacgtgatcggaatctgcgagccggtgatgacaatcggctttttggcatgctgcagcatatacgatagtgcggcagatgtataggccattgtatctgtaccgtgagtaataacaaacccgtcataggcatcataattttccttaacggcttctgctatttccacccagtattcaggctgcatattggtgctgtctatattcataagcgactgagtttccattgtgtaatcgttatcaagttttgatacgtaacttaataattcatcagccttgactccgggagccagcccattttccccttcaactgaagcaatcgttcccccagttgtcaacatcaataattttttcataccatgcacctcttcactgtatctaaagatgggttgcgagaaggtattcgcttttcgcatacttttaatgcaattatagacacggaaaataaaatacgcaagacattattattcaattcgcgtacacttcctaatacctatatgatataatcagctcaaggtgaaaaaggagcggaagttcatgaatctagatcgtttaactgaattgagaaaaaagaaaaattggtcgcttcaatatacagctgaccttctcggtatcgcaaaaagcacatatgccggctacgagtcaggctaccgacggccttcacttgaagcgcttgccatgctggctgacctctttgacacaacctgcgatgaacttttaggccgcgagaaacaaaagcagactgctcctcaggccatagaattggccacgtggagcagcctcgactttaccatttctgttgatggccagccgctgagtgaagatgaaatcatccagctgattacctttatacgcacaaaaagaaaagtacaggaggaactgagttaatctttagctcacggtttaattttaccgtaggttcctcctcctccggctttcaattccagttttccggatctcgcttttacgataagcgccgcggttttcggcgggacaacgcgagccaaatcttcttctgcagcctcatgaagaacagccatttctgttccgaaggctttttttagtttgtccagcgttttcgggcctacacccggaacaaattgcagcgggatctgatgtacatatcgcggacgcgggacgcgaacttcaagctgatcactcaattcacgcaatctatcgctgactcccttggtaaatctggcttttccgcaattcgcgcacgctgtttccccgcttacagcaggctctccgcacgcttcgcaagccgtctgataatatttccccaataacgggtccaagccataatttgcgataattttcctgtcatcttgtccctttaatgcaagagcaaattcagtaaaatcagctgactgcacatataattcattatattctctgccgattttccccaacgaatgcgcatcagaatttgttaaaaaaggatacggattcaattgcgatacgtgtgatgccatgtctgtatcacagcttaatccaagctccaccgcgtctatcatagatggatcaaaaacctcagttaagcttgatttaaccccttttccatataagcttttatgcggcgtaaagatatgggcggggataaacaggccgcccatatcctgcacttttttttgcaggtttaagcccgtttcataaatccgctgcgagcttaaatgaatatttttcagccgggctgacagccagtttgaaaactgtttcatatcagccagcgtcggcataaatacgagcacatggatcggtccgctgcaggcttcatcataaatctccagctcgctccccaataaaagagtcgtgctgcgataacggattcctcccccgtcaagctcgcgatattttccagatgaaatgccttcctcaagctctagaatgacttccggagaatgacagtcgataatgccgaggagttcaattcctttatgttcactggcttcaaccaaaattctgtccagcgttaatgttttggcgcctgttattttgacagcccttcctgtaaaggtccggccgatatgaatgtgcaaatccgcgtaaatctttttcatttttgtgcttggagcgcttctttcagctgaagatactgaatcgcgtaggctgttttagcatcatatacttcacgcgattcaaccagctttagcgcatcttcaagcgtcacctccatcacttcaacaaactcgtcctcatcaagctcccgtttttcttcaagcacagaaagctcctcagcaagaaaaacgtgaacgatttcatctgcaaatccgggtgatgtataaaacgcagttatttttgtcagtttttttgctgtataaccggtttcctcttcaagttcccgaagtgccgtatactccggctcctcacctttttcaagcttaccggccggaatttcaacgatcgtccgctcaagcggcttacggaattgtttgaccatgatgattttcccttcatctgtgacggctagtaccgctacagctccagggtgtttcacaatttcacgtttactggctttgccgtttggcagctctacatcctcgacataaagatcaatgactttacccgaaaaaatctgttctttggcaattgttttttcttctaatgatttcatttcttcatctcccgttctgtctctatatgatgccccatacattttatcatactagagcaaaagggggcttcttcgtgaaagtgcaccgcatgccaaaaggtgttgtcttagtcggaaaagcatgggaaattcgagcgaagttaaaagagtatggacgcacatttcaatatgtgaaagattggatctcaaagccataaaagttgaaactttagctcctttatattacggtcaatacaaagcctaaaaaaggagtgtgcacatgagaaagcgcaaattgggtacatctgatttagacattagcgaagtcggactcggctgtatgtctcttggaactgaaaaaaacaaagcattgtccattctggatgaagcgatcgagcttggcatcaactatttggacacagcggatttgtatgaccggggacgcaatgaagaaattgtcggtgatgcgatccaaaacagacgccatgatattattctggcaacaaaagcgggaaaccgttgggatgacggaagcgagggctggtattgggacccttcaaaagcttacataaaagaggcggtaaaaaagagccttacacgtctgaaaacagattatatcgacctttatcagctccacggcggcacgatagaggacaacattgatgaaacgattgaagcgtttgaggaattaaaacaagaaggtgtcatccgctactacggcatttcttccatccgcccgaatgtgattaaagaatatgtaaaaaaatcaaacatcgtcagcattatgatgcaattcagcctgtttgacagacgccctgaggaatggctcccgcttttagaggaacatcaaatcagcgtagtcgccagaggtcctgttgccaaagggctcttaactgaaaaaccgcttgatcaagcttcagaaagtatgaaacaaaacgggtacttgtcctattcattcgaggaactgacaaatgcccgtaaggcaatggaggaagtggctcccgatctttccatgacagaaaagtcgctgcagtatctgctagcacagccggctgtcgcttcagtgattacaggcgccagtaagattgagcagttacgggaaaatattcaggcagcaaatgcacggcgtttaaccgaagaggaaatcaaagcgctccaatctcatacgaaacaagacatttacaaagctcatcgctcatagcagaaaaaccagcacctgtacgggtgctggtttatttatattgatgccaatccatttggctttcatttaggagttcttcaaagctcttatttttttcgatctcttttttctttctaatctgttctgctttttctcttttctgcctcttttcatcctcttccttcaattggctcttcatctccataagctttgctttgatatcggattgaaggccgtcttttagctggtgtttgtcaatggatttttgttttttcatgcagacttcccccatgttttgttttgaagccagtttatcacggagcatataaactgaacaagcagactctcttctgatcactttctcagcgtagcagtgtttaggtataatgatcttaaacacgaattgcctatatatttcgttgaaaggtgctgtgacttttgaagaaaatccttttggccattggcgcgctcgtaacagctgtcatcgcaatcggaattgttttttcacatatgattctattcatcaagaaaaaaacggatgaagacattatcaaaagagagacagacaacggacatgatgtgtttgaatcatttgaacaaatggagaaaaccgcttttgtgataccctccgcttacgggtacgacataaaaggataccatgtcgcaccgcatgacacaccaaataccatcatcatctgccacggggtgacgatgaatgtactgaattctcttaagtatatgcatttatttctagatctcggctggaatgtgctcatttatgaccatcgccggcatggccaaagcggcggaaagacgaccagctacgggttttacgaaaaggatgatctcaataaggttgtcagcttgctcaaaaacaaaacaaatcatcgcggattgatcggaattcatggtgagtcgatgggggccgtgaccgccctgctttatgctggtgcacactgcagcgatggcgctgatttttatattgccgattgtccgttcgcatgttttgatgaacagcttgcctatcggctgagagcggaatacaggctcccgtcttggcccctgcttcctatcgccgacttctttttgaagctgaggggaggctatcgcgcacgtgaagtatctccgcttgctgtcattgataaaattgaaaagccggtcctctttattcacagtaaggatgatgactacattcctgtttcttcaaccgagcggctttatgaaaagaaacgcggtccgaaagcgctgtacattgccgagaacggtgaacacgccatgtcatataccaaaaatcggcatacgtaccgaaaaacagtgcaggagtttttagacaacatgaatgattcaacagaataaaaaagcgaaaggcctcttcggctctttcgcttttttatgttacagaacgtcggtaatgccatccatattttctctgatccattcaatcgcaagatctatcgttgtaaactcctgcgtctcgaaggtcatttcatcctgcaatagccagacatctttcttgatggactctgctcctccgattgaccagtgaagcaaggtataaggatggttttgattcaggaaggatacccacgttttattttgtgctgtgttcttcattgccttcagcttttgttccacgtttcgcgtctcctactttactaatatgctcattctggggctgagcatttcagccgggcttttcagcgccaatgttttggctttttcattgtaatcgatcgtcatttgatcgtcaaaaaacactttttgcgacgattggatatacagcggaatgccgttcgtttccagctgctcgcactgtcccgttaattcttctgccagccagattgtcgggacaccgcttaccgcgcagccgcatccttctgcatcgtaacgaagctgggctttttttcccgggttggcgtcaaacgcctgctgcagtgcctgttttgctgcatctgtcacatgtatgttcataaggtgaaacccccgttttcatcattttcgctattgtagcatacaatactgccattcgcattgtttctgccttttttccaccgcttcgcattttcttctgcagtcttgatccactcatctttcccttgtatatactgattgatgctgtcagggtgctgggccgccagctgttttttgagaacggcgtattctttcgctatgtttggatgagctctgagataatctctgaataacagatgcctttcaatagcagggtttccctgttcgtacatatggacatgatgagtgcgtttatttccgcccttttggaaataacgcctgcccgctataccgttctcaccttttggtgtatagccgttggccttcatttgttcatcaaattggctcacggcttcaatgcttctgacttcaattaacatatcaatgattggcttcgctgccatgttaggtattgatgtgcttccgatgtgatgaatagcgataatctccggcccgaacacaagtttcagccgttctttttcttcatcgaaacattctgcccatttttcgttgtagagaatgatctcaacttttcttttcggatacaaatgaaagaccgacagcaatagaccctgcgctgctttgacggtttctgccttttggaatccggcctgtgtatagagtgacacagccggggtattgttctcggctgtgactacttcgattttctcagcgtcttcattatgatcaatgacaaattgcagaagcgctcgtccaattccttttctgaaaccgtcaggatgcacaacaagcctgcaaatggtgagataatgcatgtttttctcatatgaaatgacaccgatcagcttgccgtttttccgatatcccgcaaaccgttcatgggatgcttgaatatcctttaccttctcttgtaaagcgggaataccgtcaaaaccgataatctctgtttcctttatgtaggcggggatctgtacggctaaaatctcacgcgctatagtggcttccttatgctggagaaattcaatcattcgtgttctcctgaaacagccgctgtctgtcgacttttgcgacgcggactgcatacgactcgtaccaaacgcttcttcctttttcttttgctgcttgatgttcagtgtgatgcctccaatggttaattgcgtccatactgtcccaataggaaactgtgatgccccttccatccgcttcacgtacgctttccacgcctaaaaatccaggctgatccgccgcaagtgataccatccgctccgctgtttctccatatcctgtgtcattttcgcttttgacagaagaaaaaatgactgcatagtaaggaggctcaggtgtttttgataaaaaatccatcatatttccccctcatatgtttttgacaaatagtaccctgtcttggcccgggccatcatagtttgcaaacactgagatgccatttaccgttttggtgcccttttcaatatcaaaccccaattttgtgtgatatgcgattgataccttattcacaggtgaagtgacacacttcacccgggtgcagcccctttgttttactgtttcgataaatacatcatacaattgtttcccaatttgcatttttctgaaatccggatgcacaccggaaaaatgaatgtacgccgtttcaggatcggattgcgattgaaatccgattaaaaatcccgtcatgctgttatgttcggatgtaataaagcttgtgtcctgaaaatgctcaaaaaatagtctcggcaatttttctttcagctgtctgccgccccaccattcattcagtacagacgttaccatttcataatctgaagacgtgattgttcgaatatccattacgatttgatctccctccgtctggcaaaacgaatgtcagctctttttctcacaatataaaaattatattttgcctggctggaattgtaaatgccttctttcctgtatcatacgtttccagactgccgagggaacaatgtttgatcattttacgcctatttctcccccaaacaggaggagagactttacagcacaatatcaagcacttgatcaagtttcagcttataaagctgatcctcgtctccttttatccatactgctttttcaaactcttcataccggcagattttcccggtgcagcagacaatctcaccgtcctgaaagcagctgacagtgatatcctgagcaaactccatcgcggcgcaaagcgtttgattcatctcttccagcttatcggggtcaaggatcggcttttgcagcttctgtttaagtcgctttctctccagcaggctttgcttatgttccggcagaaacatcctgctcccttcccacagcaggttgcccctttttaaatggtcgttcatttataatgcccccctattttagccgcacgttcaaatgcctggcctgccgctgtcagtgacgccgccctgatgattgctgtatcgccgaatcgatttttaatgccatccatcacatagcctaggctcattttctttgcataatcctgaaataaattgagctgccatatgtcatcagatgagagctgagacagattgacaccgaggcggcggacgggtttcccgtcccaaaatgtaagaaacagccgtcgtacagcctcatatacatcctgcgtagaattagtcggctctgccagcttcacttgccggttgaagcccgtcggccaatcaaaatcagcaccccggcagctcactgacactgtctgccccatgaccccggcgtttcggcttcgcctgcacacctcttcactcagctcaagcaatacgaccttgatttctttgtcaaagtgttcgtagtctctcgggagagtcattccatgacctatcgccttttgcccgtccagagacgaagttgacacaggggaatagtcgattccgtttgccgtcatccacagcacgtggccgttaatgccccatttcttttttaaaagatcgagcggaaaagccgcgagcccgccgatcgtgctgatgcccattcgatttaaatgatgcttcatgcggctcccgacgccaaacatgctgcccaccgggagcggccacatttcggttttcatattttctttcgttaaggtaaaaataccgttcttattctttttggcaaaattgtcacacgcaattttggccagcgctttgttagggccgattccgacccgtgcataaacgccgatctcccgcatgattctgccctgaatgcttttcgcgatctccatcggcgtcccaaacagcttctggctgcctgtaatgtccatgaactgttcatcgatggaatacggctccacaaggtctgtatactcctcgagaatggccgtaatttgcagtgatacatcaatataccgctgcatacgcggccggagcacaacagcctcaggacacttttcctgcgcctcccacagccgtgaagcattcaccacacccttttgtttcgccagcgggcaggcagccaatacgactccgccccttttttcagggtcacccgaaacaatgacgggcctatttttcaaatgtggattttccgctttctctacagatgcataaaacgattgcatgtcaacgagaaaaatcactttttctttcatcatacacacctctaaaaagaacttatgttcgcttttcattatatgcgaaagtatgttcgttttatactggtaaatgattcttgtctgacagaaaatatgatccaagggtttgagagaagaaaaacatttagtagaataaaagcgaagcataaggataggagagtcatgatggagaaatttgtcgaaaaaatgctgggacaggcattgcggcaatacggcagaaacgttgctatagatccgttaagcccgtatgaaaaacaaagcctgaaagcggctctacaagagagacggaatgaagaaccagatgaggatttgcatgcgcatatagaagatatcatttatgactatgtcacaaaccaaggcctgttctcttaaacgcatgactgtcagttctttcagccgctgatgcggcttccctttgaaaacaccgcctgaaacaaataaacagtctcaggcttacagaaaaaaagcaggattttctcacgctccatagattcatatggcctggcgtaaaattcccctcaatgctcgcgcaaaacggaataagctgtccatgatcacgcgtatacactttttcgaagagatgtgctctcttgttctgtcatgcggtccatgccggttttcagcgtacatcttgatctcatagccggtttcactgccgatatgatccacgttctggcggcttaaactaacacaccctcactgaccaatcgctttgcttttcatcggacatcccgtcattttccttctttcaagatgtaaactccgtcagccacacgcatcctcaacgcatagtatattgccatccatacaatcaggcatactacatgtcaataacgaaatattttgaacgatctattggagaaggaaattttttcatatatgatagagaaagatcatacatacaggagagaatataattcatgaagaaatggaaagatatccacccgatcagctggacaattataatcggaaccattttcggcagaatggcaacatcgatgagcattccttttttagcgatttatttgacagccgtccaaggcgcatcagcttcctatgcagggctggtcatcgccgcgagctcatcagtcggcatcctcgcaagcttttacggcggatatatctcagataaattcggcagaaaaaacatgatgcttgtatcgattttcggatggatgctggtatttgcaggctttgcggcagcatctaatctctgggtgttttttgtagtaaacgcattaaacggtctttgcaaatcactgtttgagcccgcttcaaaggccttgttgtctgatatgacagaagaaaaaacgagactgctagtttttaatttacgctatgcggctattaatatcggcgttgtcttcggacctgtgcttggcctatatttcggctcatcgcaatcgactacgccctttttggtgcctgcagtcatttacggactatacggaattgtgcttgccctccaatttaaaaaacatccatccttatcagcaccagcccagtcccgaaatatgagcgtgcgggaagcgtttatggtcacgcaaaaggattatctttttaccattgctttggtcggcattacgctatgcaccttcggctactcacaattcagttccacattccctcagtatatggcgcagaaccccttgatcggcaatggaacgaagctgtatgggctgatgctgacattaaacgcaatcgttgtgttggcgacgcaatttcccattgtccattttgcaaaacggttttcgccgctttgttctctgatgctcggtaatgtgatggttagcatcagcatggccattttcaccgtatcacacggtgttccatcaattgtgatgattgtcatcacatttacaatcggcgaagtgcttttattctctatgatggatttgtatgtagaccagattgcaaaaccaggattaaaaggcacttatttcggggcaatcggtttttcacagctcggaaacgtcatcggcccttgggtcggggggatatgtatagacctgtttggcgctggccggccgatttatattttttctgtcctgagcggcattaccctgctcggcctgccatttttagcgttcgcctatcggcaaatgaaaatggagaccacaaaacaccgttcccgtctggaaaagccgctttaaataaaaaacggaagagaatgaatctctcccgcaaacatgaggtgaagaacatgaatataggtgatgtgatgtttcagctgtttgtatttattatatttgccgctgtcgtctttgcggctgttacaggcttcaagtatgcgaaaaaccgaaaagcgcagctggatcgcattgagaaaaagctgaacagcctgtccgaagatcacgattaacagcttggggcaacgagctctaccttaatccggtctggatcctcacaaaagactgcataatgcccgtctcctccggcaaaaggatgcctgtctcggtacaacacacgatagccttttgccgtcaatttttcagtcatctgatcgacttgaagcttggattcagcatgaaatgcgagatggttcagaccgactcggcatctatggtattccggctctagaaatggctctttcgcctgcacaatcactaggtaaaaacgatctttcttccagctgatgcctgagctccatttttgatactctttataaccaagttcttttaagaaccagccccaaaaccgcctagacgcctccaaatcagagacatacagttcaatatgatgcacatttcataccctccttaccaacacttcctcgaccttatgcccgtctcccttacgcaaaatgagatctgacctgaatttagttggcaaaatattttcatataaattcggccggttgacactctcccaaatcgaggctgccatctcgtcagcctcctgatcggacaagtctttaaatttatgaaaatatgaatcaggattttgaaaagctgtttcccgaagcaggcgaaaacgctctaaataccaagtgaaaatccggctttcctccgcatccacataaatcgaaaaatcaaagaaatcggaaacaaaaatacgcgggttttcccggtcatcctccaaggtgggcgactgaagaacattaatgccttcaataatcacaatatccgcctgttctacaacctcgaacacaccttcctcgcggtcataggttagatgggaatacaccggggcctttacgctgtcctttcctgattttaagtcattcaaaaattcgagcagcgcctttacatcatagctttcaggaaatccttttcttgacatcatatttttctttttcagctcggcagtaggaaataaaaaaccatctgtcgtgataaggctcacttttggacggtcaggcaaacgcgaaagcagcttctgcaagatccgcgccgtcgtgctttttccgactgcgacactgccggcaatgccgataataaacggaattttggctgaatgtgggtgcttcaaaaaaacattgacatgcttattgcgttcagccgcagacttgacatgtaaatgaagcaagcgaacaagcggaatatagatcgtctccacttcttcaacagatagataatcattcaatccttccacagcttttgcctcttcttcagatacagcaatcgacaaatgccccccaaaaccagaccaagactcccgattgtgctgtgtatataaagtatgtaggttaagttctttatttttcactgtttacacctgactctctgtaggttaaaacccttacaaagattgtaacggaaaaccttttcactgtctgcttatttttcatttcgtttttttagcaaatcagcaccgattcggttatacgcagccatttcatcttttggaaccatgcttcctcccgttccccagacgacatgtacggcatgttccatcttatatttctgagcatagcgccttccctcttctgtcgaaaaaagctgaaccggcccgaacatgccagcaagagcagagggctctaaatatttatcttcagatacagccagcatatgaagcaaagtataaagcgtattgtcctctaccgtataacagccgctcagaagcggttcaatcagcttgccgacaaatcctgacggcctccctacggcaagtccgtcagcagccgtctgattatccaggccgatatcctggacggagatcttctcgtgaagtcctgaataaagccctaacagcatacaaggtgaatgagttggttctgcgaaaaacacatgaacatcatctccgtataaaagcttcagcccaaatgctacaccgcccggtcctccgccgactccgcacggcagatacacaaacaagggcgtctcaagacttggctttatattcatacagtcaagctgtgtttttaatcggcttgcagcaacagcatatcctaagaacagctgacgagaatgttcatcatcaataaaataacagaatggatcttgttccgcctgccgtctcccttcgttcaccgcttcactgtaatctgtttcgtactccataacagtgactcccttttggcggaggagatcctttttccactgcttagcatcggcggacatatgcactgtcacgcgaaacccgagtgccgcgccgatgatgccgatgcttaaacctagatttcctgtcgaaccgacagcaatcgaatagcgggagaaaaacccggtaaaccgctcttcctgtaagatgcggtaatcatcggtttcctgaagcattccttcttgaagcgcgagattttcagcatactttaacacttcataaatcccgcccctcgctttaatcgatcctgaaatcggaagctcatggtcgcactttaaaagccatcttccgggaaatggctgctgatatgccgcttccagctttcccttcatatgctgcacctcaaaaagcggagactcgatgattcctttagcgcctttcgtctcaggaaacacctcggcaatgtaaggtgcaaaccgctgcattcttttttccgcttccgctatctcggttgcccactcatctgcacggggtaatggcccctctttcttgcctgaatttgcccagaatacaggctctgcatcaatcagtttctgaataaacggatctttaagcagagcatgaaggacttctgaatgaactgacattcaacaatctctcccttccactatcaaaaactgccccgtgagaaacaagccactccaccacaggcagttctatcattattttttcatgagcgcgcgtcctgccagcttttctacaagagctggaaacagctgatacagcttagtgccggcattcattaaacgcggaagattgatctcccgctttttcgtaaaaattgcagctgtaatttgagctgccacgtcatcaggatcaagcatccagcggccgacatttttggcgtagtccccgcctttatcagcaatggaaaaaaagtccgtctgaatcgggcccgggttgactgttgtcacataaatgccggttcccgaaagctccatccgcaaagcgtttgagtaacctaacacggcatgtttggtcgcggaatacaggctagacttcggtgtggcgattttccccgcttgagaggcgatattgatgatatgtccctttttttgctcaagcatttgcggaagcaccgcttttgtacaggcgatcaggccgaagacattcacatcaaacatcgctttcatgtcatccaatgtagagtctaaaaccgtttcaaatataccgaagcctgcattgttaatcagtacatcaatcgagccgatctgatcgcggacccgggcgatatcctctaggcggccgacatccagaggaaaaatctcacactgtccgctccattcctcggttattttccttttgatttctatcaaacgatcctcgcgtctagccgacagcaggacatgggctccttcagccgcgcataagtatgcgattctttctccaagccctcctgaagcgccggttatccaaatcctttttcccgctatatgtttcacccatttcacctcttcattgttttaaagtatacggtatttccttcccaatatgacgtgatggcttcttcagcctccaacacatcaaggtgacctgccgtttctgacatcgttaaaaacaattccttttcatatacagcaggaaaaagctgctgacagacctgaaaagcggtcatcggcttttcatccagcatgcgacgcacatcctccgtcctgttcctctgcttgtcaaaacgcttctcaatcagcgcttgtacactggtgataggctcgccgtgaccaggaaatacgattgttggatcaagttgagacagccttcgcaatgaccgctgataatccactaaaggctttgacctgacgtctcccgctttcggcgcttccaaaatcggattagacgagctgtttgccagcagtagatcgccgccaagcatccttccgcttttttcatggaacagaacaatatgcgattcagcatgtccaggcatctccaacacagaccagccctcaagcccatctatgcccataccttctctgattgattttgtcagagatctcgtacaggaaaatgcgtacgctgatcgaatcagcttttccgccttccccgtatcaaatggaacgcctaattcaggcagcagcttttgaaaaaaacgtttttgccaatccataaaggcttgattttggctgatataaggttcgttgaatgtatgcccaatcacttcgatttcatctgaaaagacatcaagcaagcctgcatgatcagcatgatggtgagtcagtacaacctgctcgatatctgacaatttcacatttacagcggcaagctgctcttgtaaggctctggcagcctcttttgtattcggcccggcatcgataagtgtcagcgcatcaccttttacgaggtaaacgataacatcgccgacagcaaacggtgtcgggacgcggatcgcaattacatcttcagttgtcatcctttcgctccttgtcttcattcattattcatattttagctttttctcggtcttgtgtcattattgcagaatgagaacaaacctttttgaaaaagctattgacattagcttgtccgccattgcataatgaacaacaaactaaaacgagaaccattggaacgctatgacgaggaatagtatacaaggcaatggcctaagagagcgatacccccggctgaaaggtgttgcggcccgcttgtttgtagaacctgccctcaagtcgcggttaggaaaacctaaacgtttcccgcgttacggggatttgagctgagcacaatttgtgctaatgagggtggtaccgcgaaccttttcgtcctttacgtgatgaaaaggttttttgttgttctaatagaaggaggatatcaatgaaaaagataggatttgtcggcgccgggtcaatggcagaagcaatgatcaacggcattttgcaaagcggcatcacaaaaccagaacatatctatattacaaatcgctcaaatgacgagcgtctgattgaattaaaggaaacgtacagcgtgcgtccatgcagagataaaaatgagtttttcactcacaccgatatcattatcctcgctttcaaaccgaaagacgcggcggaaagcatcgacagcatccggccgtatatcaaggaccagcttgtcatttcagtacttgcaggccttaccatcgaaaccattcagcattattttggcagaaagctcgcggtcattcgcgtcatgcctaatacatcagcggcaatcagaaaatcagcaaccggattttccgtaagcacggaagcaagcaagaatgatattattgccgcaaaagctctattggaaacaatcggtgatgcaacactggttgaggagcggcatcttgacgctgtcactgcaatcgcaggcagcggcccggcctatgtgtatcgttatattgaggcgatggaaaaagcagcacaaaaagtaggattagataaagaaacggcaaaagcactcattttgcagacaatggcaggggcaacagatatgctcctccaaagcggcaaacagccggaaaagctgcgtaaagaaatcaccagtcctgggggcactacagaggcaggtcttcgcgctttacaggactcccgctttgaagaagcaattattcactgtattgaagaaacagctaaacggagcgcagaaatcaaagaacagtttgccggtgccgccttagagagacattcttagatgtaaggacaaaaacagaaggcacagtgccttctgttttttatttttcccgcagcagctggccggcagattctgattgctttaatagcgcggagatcgtaaatgaaagcaaatcgggaagcacttcaaaggaataaggcatatacaatctttccgtccatttatgcgggtctttaccagccggaccgacatttaaaactgggacatataaagcctgatttttaccgcttggcaatgaataccctctgttaaagagcggcatattgcttgtgtatgcatcaacctcctgtttttccagctgaagataactcaagtccgaaagtccggggaagtactgaacctcccgtaatgcaatgccgtatcgctcagccgcataatgctttatctgatctgctgtatttctgatcaattgatcatcctttgaagaaacagctggataaagcggcggactataaaacagaacgatgagcggcgcatcctccttacaaagcgaagcaagctcagaaacaattttcgtcgaaaaatccctgtctccaagctcccccctgttagcaaaggcataatttagagcccgctctgtttccgagatccccgcacgcttttttgcacgcgagaccagctcatcaaatgtcaaaacagtgacgtcccgctcaatcggctgaaatggctcaaattgttgaaaatcctgtgttttcttccgaacgttcgacatgatttcctccgccgcctgttctgctgttttaagcagcatctgatgcagctcactagctgagcgtttcattgacagcacattaaataatgtgacggctgtatgcggtgtctggactgaatatgcctctttcaagtccttttgcattaagtttaccggcggcggagtgacctcgccatcaaccttttcgcaataatcagcattcagttcaagcaaacggttaatctcagataccattaaatttgcgtttagacctgaaaacggctctccaacatgtgtctcaatccccttgcagaaaaaacccgcaagcaccttgccaatgcttcctgtataaaaatattgctgctgatcgccgggaaatttttcaaacatcggttcggcattcaggcaagcggttaatgtgatatcatgctttttctccatctccttcaatgcaggaaccgcttcaatcatgcctcttgaattcacttcctcgtccggaaccgttatcaacagcagattgccctcaaaatgcccgttcattgccctctccagcatcgacagttgaatacaaagccccgctttcatatccatcgtccctcttccgaacagccagtctccgctttcggcatctcttctcacacgttccgggagcagctcttttttctctaaaaaggagctcaaaagctcagcaggcttgcaagccatatgtttaaattcgccgtaatcttctatgtcaacgacatcaaaatgactcagcagaagcactgtctttttgacattcttctttttgactagagccgtaagaaaagatctgccatcgtccatcggatgaagtgttacatcatcagggtgcttttgaaaatagggcttgtccttcaaaataaaataaagatactctgcaagcgctacctcgccctttgaaccggtgatgctttcgtattgcacaagagaagttaaaagtgccagcaattcgtccttcgtctgccaattcattgattccgcccctcctatgaataaaaatgcttctatactgaaaaataaactgatttctcgtctattatacagaaatgtttgacaaaagcggttcatttgagcagtttatatgacgggaaagaaatgacttgatataatcaatctctaaaaaccttacgggaggcgaaagaaatggccagaaaattatttacacctattacaattaaagatatgacgttaaaaaaccgcattgtcatgtcgccaatgtgcatgtattcttctcatgaaaaggacggaaaattaacaccgttccacatggcacattacatatcgcgcgcaatcggccaggtcggactgattattgtagaggcgtcagcggttaaccctcaaggacgaatcactgaccaagacttaggcatttggagcgacgagcatattgaaggctttgcaaaactgactgagcaggtcaaagaacaaggttcaaaaatcggcattcagcttgcccatgccggacgtaaagctgagcttgaaggagatatcttcgctccatcggcgattgcgtttgacgaacaatcagcaacacctgtagaaatgtcagcagaaaaagtaaaagaaacggtccaggagttcaagcaagcggctgcccgcgcaaaagaagccggctttgatgtgattgaaattcatgcggcgcacggatatttaattcatgaatttttgtctccgctttccaaccatcgaacagatgaatatggcggctcacctgaaaaccgctatcgtttcttgagagagatcattgatgaagtcaaacaagtatgggacggtcctttatttgtccgtgtatctgcttctgactacactgataaaggcttagacattgccgatcacatcggttttgcaaaatggatgaaggagcagggtgttgacttaattgactgcagctcaggcgcccttgttcacgcagacattaacgtattccctggctatcaggtcagcttcgctgagaaaatccgtgaacaggcggacatggctactggtgccgtcggcatgattacagacggttcaatggctgaagaaattctgcaaaacggacgtgccgacctcatctttatcggcagagagcttttgcgggatccattttttgcaagaactgctgcgaaacagctcaatacagagattccggcccctgttcaatacgaaagaggctggtaatgcccataagagatatcctgtagaggatatctctttttttatttttagagaaacgatcggctaaggttctccgtctccctagtagaaccaattagaggagatgactccaatgaaatcagcttggatggaaaagacatatacaattgacggatgtgcgtttcatacacagcaccggaaaggatcaagcggtgtaacgattgtctttgaggccggctatggtacttcttctgagacgtggaaaccattaatggcggacattgatgatgaatttggcattttcacatatgatcgggcaggcataggaaaaagcgggcaaagcagagctaaacgaacagctgatcaacaagtgaaagaattggagagtttgcttaaagcagctgatgtaaaacctccttatttggctgtttcacactcatacggagctgtcatcaccggtttatgggcctgcaaaaacaagcatgatattatcggcatggtccttcttgacccagctttaggcgattgcgccagctttacctttatacccgaagaaatgcacaaatcacatacgagaaagatgatgcttgagggcacacatgcagagttttcaaaaagtctgcaggagctcaaaaagcggcaagtccacttaggaaacatgcctcttcttgtgttgtcatcaggagaacggactgagaaattcgctgctgaacaggagtggcaaaacttgcacagcagcatattgtctctatctaaccaaagcggctggattcaagctaaaaacagctcccacaacatccatcatgatgaacctcatatcgttcacttggctatttatgacgtatggtgcgcagcgtgccagcaggccgctcctctttaccaggcagtcaattaacgtaaaaaaagaccgggccgtaagggattcccggtcttttatattattttgtttcacggtgaagggtatatttctttaaacgcggtgaatattttttcagctccaaacggtctggattggtgcgtttattttttgttgtgatgtaatttcggtctcccgtttcagtgcaaagctaaagtaacatttactctcataattaacatctccttataaaacgtaatgattacgttttattatacaacgtcatcacaaattgtcaaataagagctccgccttcagcctcgcgggacgtttacctctaagaaatcatatgccgccacgctattggggaaaacgtcaaccgcttctttttgaagctccaaagaagcatctccctgatatcttgcgctgatatgggttaaaatgagctgcttcgctcttgcttctttcgctgttacagccgcttgttccgttgtactgtgataataatcataagcaagtttacggtcttccttagcaaaggttgcttcatgaacaagcacatcacaatccctcgcaagctcttttagtttgtcacttactctcgtatcaccggagaacacaacagatcttccctttttaggaggctccagaaaatcattcccattgatgattcgtccgtcttcaagcgttaccgtttcgccttttttgattttctgatatacaggtccgggcgggatgttcatttcttttaatacgtcagccttcaaggaacccggtacgtctttttcctgcacacggtacccgaaggcttccactccatgaataacagataccgctgtgacaataaactgatcgtcctcaaacacgattccttcttcaatttcctggatcgcaagcggatatgtcaaatgggttttcgtgacggcaaggcttgtttcaataaacgccttgatccctttaggtccgtacactgtcagctcgtcctctccgccttgaaaggaacggctccccagaagccccggaagtccgtatacatgatcgccgtgcatgtgtgtaataaagattttctctattttacgaggtttaatcgttgtatgtaaaatttgatgctgtgtggcttccccgcagtcaaaaagccataccgaacgcctttcttcaagcaattttaatgccaccgacgttacatttctcgccttggcggggatgccggctcccgtccctaaaaaaagtaattccacgtttccttcctcctactagaaccagatacctacaagaatacaggatcaagcggaaaatgtgaatcttgcctctgaaaagaacaatcctttcgtgctagaaacattttttcagcattctgcttaaaaaagggcttaaatgtttgctttcgttgaattttagatttaaaatgaaggaaatatacggggtgtactaaaataaagcttcgaataaagtgaggtacttttagtgaaaacaaaccaacaaccaaaagcagtaattgtcatattcggtgcaactggagatttagcaaaacgaaaattgtatccgtctattcaccgtttatatcaaaacggacaaatcggagaagagtttgcagtggtaggagttggaagaagaccttggtctaatgaggatcttcgccaaactgttaaaacatccatttcctcatctgcagataagcatatagatgatttcacgtctcatttttactatcacccgtttgacgtgacaaaccctggttcttatcaagagctaaacgtattgcttaaccagctggaagatacatatcaaattcctaacaacagaatgttctacttggcaatggctcctgaattcttcggaacgattgcaaaaacattaaaatcagagggtgtaacagctacaaccggctggtcccgccttgtcatcgaaaaaccgttcggccatgatctgccaagcgcacaggcattgaataaagaaatccgcgaagcatttacggaagatcaaatttacagaatcgaccattatctaggcaaacaaatggttcagaacattgaagtgattcgatttgccaatgcgattttcgaaccgctttggacaaaccgctacatttcaaacattcaaatcacatctagcgaatcactaggcgttgaagaccgcgcaagatattacgaaaaatcaggcgcccttcgcgacatggtgcaaaaccatattatgcagatggttgcccttcttgcaatggagccgcctatcaaattgaacacagaagaaatccgcagcgagaaagtgaaggtgctgagagcactgcgtcctattgcaaaagacgaagtggatgaatactttgtgcgcggacaatatcatgctggtgaaattgacggtgtaccggttcctgcttatacagatgaagataatgtcgctcctgactccaatacagaaacctttgttgccggcaagctcttgatcgacaacttcagatgggctggtgttccattctacatcagaaccggaaaacgaatgaaagaaaagtccacaaaaattgtcgttcaatttaaggacattccgatgaacctgtactacggtaatgaaaacaacatgaatccgaacttgcttgtcattcatattcagcctgacgaaggcattacgctttacttaaatgctaaaaagcttggcggagcagcacacgcacagccaatcaaactcgattattgcagcaattgcaatgacgagttgaacacccctgaagcatatgaaaaactaattcacgactgtcttcttggcgatgcaacaaactttgcacactgggatgaagttgccctttcttggagctttgtcgactctatttctgaaacatgggcagcaaacaaaaccttatctcctaactacgaatcaggctcaatgggaccgaaagaatctgatgatcttttggtgaaagacggcttacactggtggaacatataataagaagaaaaaagccgaaaatgtttacaagcattttcggcttttttacgctgaacaaaggtataacaatctccttaataacaaaacccccaaagcttaagagcttcgggggtttctattgattacttcatccattcagtatggaagatgccttctttgtcagtacgctcataagtatgagcgccaaagtagtcgcgctgtgcttggattaagtttgcaggcagtacggctgtgcggtagctgtcatagtaggctaatgcgcttgagaatgatggcaccggcacaccttgggcaactgcaagtgaaatcacttggcgaagcgctccttgatagctttctacaatattcttgaaatagctgtcaagaagcaggttgtcaagctcaggctcgcgatcgtaagcttctttgatcttctgaaggaatgccgcgcgaatgatgcaaccaccgcggaagatcatagcgatttcaccatatttcagatcccagttgtattcttcagaagcagctttcatttgggcaaatccttgcgcgtatgaacagattttactcatgaacaacgcttttctgaccgcttcaatcagctcttctttattttctgtaacaggcttcacttctggtcctgaaagaagtccgctcgcttttacacgctcttccttcatagctgagataaagcgtgcgaatacagattcagtaataatcggaagcggaacgcctaagtcaagtgcgctttggcttgtccattttcctgttcctttttggcctgctttatcaagaatcacatcaacaagcggtttgcctgtttcttcgtctttttttgtgaagatgtcagccgtaatctcaatcaggtagctatcaagctcacctttattccattcagcgaaaacttcatgaagctcatcagcagaaaggcccagcacctgtttcagaatgaaatatgattcagagatcagctgcatatctccgtattcaattccgttgtgcaccatttttacgtaatggccggcgccgtccggaccgatatatgtcgtacaaggttctccgtcaacttttgcagaaatggcttcaagaatcggttttacaagctcatgtgcttctttttgtccgccaggcatgatagaaggtcctttaagcgctccttcttctccgccggaaacgcctgttccgataaaatgaatgccgctttcagcgagttctttgttacggcgctgtgtatctttatagtatgtattaccgccgtcaattaaaatatcatccttctctagatgaggaagaagagattgaattgtcgcatctgttgcagttcccgctttaaccattaataagattttgcgcggtgtttccaaggattggacaaattcttcaatgctgtaagtgccaacaacattttttccttttgcctcctgtaaaaactcctcagttttactgcttgatctgttgtaaacagaaacagaaaatccccggctttcgatatttaaagccagatttttacccatgaccgcaagtccgataacgccgatttgttgttttgacatattctaacgtcccttctgcaaacgtttaatcattttaaaatttaaattaaaataaaatgatatttataataaagaaattaccatacattcaccctttttttcaagcgattcagcttttcttttcatcttgaaaaaaatctttattaaagcttgttccctttgttttgctctcctctttttttaacgttgccccttttctgatcagtttggtaccgtactttttattcagcttttccatcatctgctgaatgggctcatccttcgcatcttcattaaagctgaacaaatcgagctgtttataggcctgctctttttctactaaatccgttccggtaatgccaagcagcctgacaggatttttattccaatgtttaaaaaagaggtgctccgcttctttcaaaatgtcatttttttgatcaatcgggtttctcagcgtagtgcttcttgtgatggttctccaatccgcatatctaatcataataaaaagcttcgaagccatgacttccttgcgctgtaaacggtcactcacagaagcggcaagctttctaaaaacgcctaacagctcttcttcatcactggaatcatgggaaagtgtcgatgagttgccgacgcttttaaattcgtaaatgcgctccgggtcaaccggcgcatggtgaatgccatttgctttatttttaaggcgcggaccgttgatgccaagcaggcgcttcagcgagtgttcatcagctgcagctagctctccgattgtatggatgccgagtcccttcagtttttccgctgtctttttgccgactccgtgcatctctccaacaggaagcggccacaggatatcgggcacttgcctctttcttaagatcgtaattccaagcggttttttcatatcagacgccatcttagcgagaaatttattcggtgcaatccctatgcttgacgggagcagcagctctttttgcagcctgctttggatttcttttgccgtctctagagcgcggctgctgtatggtgtatcggtcatgtccatatagccttcgtcgatggagacaggctccactaggtcagtatattcacgaagaatggtaaacatcgctcgtgaagagtttctatagcggtcaaagttcggcggaagaacgatgagctcaggacaatggcgcttcgcttgccaaaccggcatcgttgttttgacgccgcgcgctcttgcttcgtagctgcatgttaccacaatgccctttcgctcctttacgtttccggcaactgcgaccggctttccccggagagccggatcatatgccatttcaaccgacgcataaaagctattcatatcaatatggaaaataattcggctctttcccggcataaacaaatctccttttcggtcattagacaacagcttgtacatatagtaaaatgaagctattgaatggatgtgatgacaatgtttgtggaatcgataaatgacgttttattcttagtcgattttttcacaattattcttcctgctctaacggcaatcgggattgcattcctcttacgggagtgccgtgcgggcgagcaatggaaatcaaaacgaacagatgaacatcagacggtctttcacattaaccgaacagactttcttattattatatatcatcgcattacaacttggatacgtaaagtcttccgcatgaattcgcctgtgaacgatgaggaagacgccggttctcttcttttataaaccgcatttataaaaaggaggagaacaaaattgttaaaaacatatcaaaaacttttggctatgggtatctttttgatcgtattatgctcgggcaatgctgcatttgcagcgactaatcaggtgggaggcctcagcaacgtaggttttttccacgattatttaatcgaaccgttttccgctctgcttaagggtgttgccgggctgtttcacggagaatacggactctctattatcctcgtaaccattattgtgcgtatagttgtattgcctttgtttgtcaatcagttcaaaaaacagcgcatcttccaagagaaaatggccgttattaaacctcaggttgacagtatccaggttaagttgaaaaagacgaaggacccggaaaagcaaaaagagctgcaaatggaaatgatgaagctgtatcaggagcataatatcaacccgcttgcgatgggctgtcttccaatgctgattcagtctccgattatgattgggctttattacgcgattcgctcaacacctgaaattgcgtcacactcgtttctatggttcagtttagggcaatctgatattctcatgtcccttagtgcagggattatgtattttgtccaagcctatatcgctcaaaaactgagcgcgaaatattccgctgtcccgcaaaaccctgcagcgcagcaatccgcaaaattgatggtgttcatcttccctgtgatgatgacgattttctcgcttaatgtgccggcagcccttccgctgtactggtttacaagcggactgtttttgacagtgcaaaacatcgtccttcagatgacgcatcataaaagtaaaaaaacagccgctcttactgagtcggtgaaataaaaaagcaaccccgtgcaaaaagccggggttgttttttgttacttgcaaagtaccgcgccaaacagtcttgtttatcatggctgaagcagaaatggccatcctaaaaaatagccgtatcgtttaaaaagaaggaaatcgggaatacctttactcacctccaaccgaaaggagcctatacgttgacggaacgctttcagcaaaaaaatatttctgtacctgatggaatctggatcatgagacaaacctggaatgatgtcttatttgctcactggcctgttgatgtttctatccttcgcgctttggtaccgtccgttttagaattagatacatataacgggcaagcttggatcagcatgcttccctttatgctcacgaacctgagggcgcgttatctccctgtcattcccggtgcgcgtgcatttcctgagcttaacctccgcacctatgtcacgtataaaggcaagcccggcatttatttttttagcttagatgccgatcatcgtctggcggtccttggcgctcgcacattctttcatctgccttatttttacgcggatatgaagtccgaaaaaaacggtgatgccattgactatgtcagcaagcggaaaaatgacaaagaagcagcattccacgccgcataccggccaatttcagcgccttttacagcagaaaaggattcgctcgattactggctgacagaacgatacaggctctacaccacttatcgcaataagctctattacgaagacatccatcatcatccgtggctgctgcaaaacgccgaagcagaaatttcagtcaatacggtgactgatgctcacggtattacattgccggagtcagaccccttgcttcattatgctaaaaaacaggatgtgttattttggccgcttaggaaatggagctaaaaaaacccgatgcgggaaatcgcactcgggttttctttttttattttgccgcctcttcaataatggcaacaaccatttctgccgttttaacgagctcttcgatcggcattttttcattttttgtatggatttgctcataaccgacagcaagattgaccgtcgggatgccatgaccagcgattacgttcgcgtcgcttccgccgccgctcgtttgcagctcgcttggacgtccgattttagcagccgcttttttcgcgatttcaacaacttggtcgccgtcttgatatttaaagcccggatacataacctcaatttcgacttctgcgcgtccgcccatatcagcagctgcctcttcaaaagcagctttcattttttgaacctgagcttccattttctcaggaactaaagagcgcgcttcagcaagaatatgaacttcgtcgcacacaatgtttgtttgtgtgccgccttcaaaccggccgatattagctgttgtttcttcatcgatacggcccaatggcatttttgagatggctttgctagcgattgtaatcgctgaaatgcctttttcaggttcaaccccggcgtgagcggttttcccgaaaattgccgctcttaccttcgcctgtgtcggcgcggccacaatgatatttccgacttttccgtctgaatcaagagcatagccgtaggatgcagtgatcatagaacggtcaagcgccttcgctccgatcagacccgattcttcccctactgtgatgatgaattcaatcgtgccgtgttcaatattttcttctttcagcaccttaatcgcctcaaacattgcagccaatcccgctttatcatcagcacctaaaatcgtcgtgccgtcagttttgacgtaaccgttctctacaactggttttacgccgtttccgggtacaactgtgtccatatgagatgtaaaatagatcgtatctgtttgttttgtcccttttagcgtgcaaatcaggttaccggctccgtggcccgtgatatccattgtatcgtcttctttaacgtccacacctaaatcagaaaattttcgtttcagcactttgcagatttcagcttcgtgctttgtttctgagtcaatttggacaagctctaaaaattcttccagcaggcgtttttcattcaccatttgtaagtccctccatattaaagcggtatgttaccgtgcttttttttcggtctctcttctgtcttatgtgtaagcatatgaaaagcttgaatcagtcttccccttgattcttccggcaaaatgatgtcatcgaccattccacaagcggccgctttgtatgggccggcgttttgctttttgtattcagcagttttttcgcgtttcgtcttttgcgggtcagctgaagctttgatttccttttcatacaaaatcgatgccgcaccttctggacccatcactgcgatttcagcattcggccatgcaaacacaaggtccgctccgatcgctttgctgttcatggccacataggcgccgccgtacgcttttctaatgatgagtgtgacttttgggacagtcgcttcagcataagcaaacaataattttgctccatgcctgatgattccgttgtgctcttgctgaatacccggcagaaaccccgggacatcttcgacagtcaacagcgggatatcaaatgcgtcacaaaaacggatgaaccttgctgctttatcagcagcgtcaatcgtcaggcttcccgccagatgcttcggctggctcgccacgatgccgattgctttttcacccagccttgcaaacccaatgacaatgttcttcgcaaaaaatggctgaatctcaaaaaaagactgcgggtcagccagctccctaatcaccttccgaacatcataaggctttgtcgtatcagcagggacaagacggtttaataacggtctggacgcctctttctctggcttcggctctgttgtccggccattcagcggcaaataagacagtagttttctcacccctgtcagaacctccttctccgtatgcccggaaaagtgggcgtttccgctgacggcattatgtatccccgctccgcctaagctctccgcatcaacctgttcccctgtcactttttcaatcaccttcgggccggtaataaacatccggccagtctgttcagccataaatataaaatctgtgagtgccggagaatatacagcgcctccagcgcacggccctaaaataaccgatatttgcggaatgactccggaatataagacgtttcggtaaaatatgtgaccgtatccatctaatgataacacaccctcttgaattctcgcaccacctgagtcattcagcccgataatcggcgccttattttttgctgccagatccatcaaagcgcagattttcctggcatgggtttcgccaagcgcccctccgtacactgtgaagtcttgcgcaaatacataaactgagcgaccgtcaattgtgccgtaccctgtcacgaccccatcccctaacatgcgctgttctcttgttaacacttgactttccatgaaggggtgtaattcgataaagctgtcctgatctagaagaaatatgatcctttcccgagcagtgagcttgcccttttgccgctgctgagccagcttttcccgtcctccgccttcttctgcctgcttgcgtttcgtgtaaaaatgatccatgtgctcattcatgctcattgtgttggtctcctttcggttcacaaagctctacaagaacaccgtttgtttcccgaggggaaataaacgcgatctttttcccgttcgctccctgtcttggaaacctgtcaatcaattgaacatgctgatcagacaatgcttgaagctgttcagataggcagttgcacaaaaacgcaatatgatgcagtccctgccctttcttctccaaaaataaatggacggggctgtcagctgtcaacggctctatcagctcaagtttgacgctaccagcttgaaaaaaagcaacattcaccttttgctcttcaaccgtttcttgatgaagaaatgcaagccccaatacattttcataaaagcttcttgcatcttttatcgaaaaaacggctatcccgatatggtcaagcctgttcattttcatccctgctttcgctaatagatatcgcttgtccgcccattcaaaacacgctaaaatatagacagattgtttaaggagtgaaaatcatgtctcaaaaactgatgaaaagcgttttgatcgtgattttgggagtttttattctttcaactgtactctcaggaatcgtcatgtttctataacgataaaaaagcaggcgccttattcaatgggaatatcctgcttttttatcagagctttatgctcgatggcaatctcctcaaaagagcggttgtcgtccgtgatcagcactctcgttcctactggtatcgtttgaaacaaatgaacaacctcatcgttatgcatacgtatacagccgttagacacaaattttcctactgattcctctcggtttgtcccatgaattccataaatccgcccgtccgttcctttcgcgtcaaatccgatccatcttgccccaagcgggttatcaggagatcccccttcaatatttttctttctgtagtaaggattttccgcttttaccgttaccgaaaactctccttcaggcgtcaaatcatctgtttttccagtcgccacactatacacgccttctactttgttgtcgaggataacagcaagttcatttgttcgcttgttgacaataacatacggatcacccggcagcggattttcgccgagcggccaaatcggtgaaatcatcatgaaaatcgaacataagaaaaaacgcataagctcctcctttttcattaggttgaccaatgaaggaagagctcatgcgaatcatccgagtgatttttgcgcttttattcctttaaaataacttttaatcactaaatattgttccatttcgccgagaagatggaagagagcggccctcgcttcaaattcctctctagtcgcaggaagcggcatctcctcaaattcttttctcatgtcagcaagtcttttcagaaatttgtatgctgtattcccagggtgtatcgcctcccgcaaatcatgaataaattcagcgatcatttttccctgatctaccgtgatggagatcgatgtcactttagggagaaggcgttcgataatttcaaattgcttttctctcattttaaaataatgataatgcagattttcataacgcaaaatgtggttttgcacatctcgatatgccaggtttttagcctccgtaatgagctggtgcgtttccggaatttcttttcctgaccaatcttgctcaccagttaacaaataccgttcgatttctgcaaaaatgacagcaaagttatcctctatctttttgcggtaggcaatcagtttccggtcaagactaggcatatacaagttcatcaatagagcgacgccgatgccaaccgtaatcagctgaacttcattccagatgaaagtaggcgtaatgccgccggacatgtataaatgaaggataataacagaactggtgacgataccctcgttaatttttaacagaaccgttatcggaatgaatatcaaaagaagcgctccgatcacaaacgggtggtagccaataagctcgaaaaagagataagaaaaagcaattgccagacagcatgccgaaaagcgggcccatgaggcctgaagcgaccgtttttgtgtgatttgtatgcacaaaatggtgatgattcctgctgatgcgaagttttgcaaatgcaataactggcttatataaatagccaaagctgttccaagcgcggtctttattgtgcggtaaccaattttaaacatgtcggactccatttctatttgtttcttcaataaaaaagaagaggcggccagccttcttcttttttatattctataatattttctctaaaaagtcctgcgctcttttggattttggcgacataaaaaattccttcggattgccgtcttcgacaatcattccttggtccataaacagcacacggtctgccacttcttttgcgaagcccatttcatgtgtgacaatcaccatggtcatgccggtttcgaccagctctttcatcacctgtagcacttctttgaccatctctggatcaagggcggaggtcggctcgtcaaacagcatgatgtccggattcatcgcaagagccctggcaatcgcgacacgctgtttttgtccgccagacaaacggtttggatagtcatttcgcttttcaaacaaaccgactttgcggagcaggtcctcagctttctcctgtgcagcctgttttgattctttttttacattgacaggcgcgtacatgatgttttcgagaaccgttttgtgcggaaagagatgaaaatgctgaaaaaccatcccgatgttttcccggacctttaatgtgttggttttcggcttcgtaatctctgtgtcttttattgtaatggttccgccgttaggcttttccaacaggtttaaacagcgtaagaacgttgatttgcctgagcctgaaggaccgatcacggcaacaacctcaccctcagcgattgttgttgaaatgttttttaatacttcgtgtttcccaaatgattttgacagcttttcaaccttaatcattggatttcagcttcctttctacagccttgccgataaacgttaaaatcaggacaagcacataataaatcaatcccgcgataatgagcggctcaaggtaattgtaagtggcggcgccagcttgatatgcgcgtctcatgacatcaccaagcccgatgacggtgacgatcgccgattcttttgttaacgtaattaattcattcacaattgcaggtgatatatttttgaaggcctgcggcagcagcagatccttcatcatttttccatacgggacaccgagtgcaacagcagcttctttttgccctttatcaatggcattgattccggctctgataatttccgatacataagcggcggaattcaaagacaatgcgacaaccgcagcccaaaactggtcaatttgaaatccgagcagctgaggaaggccaaaatagacaatcataagctgcagcactaaaggcgtgcctcggaacactgatgtataaaaatcagcgatccagataaacgggcggaatgtgctgatcttgcataagcttagcacaataccgagtataagtccgataatagcagatacaacaacaatttttaatgtaattgccaagccttctaatataaaaggaatttgggggatcgttgctgaaaaatccaaattcatagcctttgtctccttttcttacaggaaaaaagtttcctattcaataaaaaggctcaacgaaaaagttgagccgcttttttttacttctcgccagtgaaccattttttcttcaatttctcaagctctccgttatcttccatttccttgagcgctttattgaatttgtctgtcagttcactgtcctttctgaaagcaattgctgaaccggcttcttccgctttcgcatcaggaatcacaaagccttgcaggtcatcatttgatttgaaatacccttctgcaacaatgtcttcaataatcgcggcatcgaagcggtcagatttgatttcctgcaccaaatcagaaattctgttgcggtcttctgttttaaaaccatattccggagaaagctctttccccttctcttcctgaatagagccaagctgaacgccaactgtttttcctttcaggtctttcaaagattgaatgccgctgtcttttttgctgacaatcatatggttcgctgtgtaatacacatcggaaaaatcaacttgttttttacgctcaggcgttggtgtcattcctgacagaacgagatccacctgttttgatttaagcgctgtaattaagctgttgaagtccatatcctgcacttcaatttcatagcctgccttctttgccagagcttttgccagctctacatcaaagccgacaatattatctccttctttatattcaaacggtttgtaatccgccgaagtacccataattaattttttctttccgctttctgaacctgaattgcttgagccgcacgcagttaatgcaaaggtgatgcaagcagccacaagtaataagagccattttttcatgatccatttcccccgtattcattacttttggtgtatttgaatatttattcgttaatttgtattttaaacagtttctcatttttatgcaatactatttttaaaaattatctttaggcttatctttccagtgatctcttctgatattactagataaaaattaaatcgctgtacaatccgattgaataatcccttaatatttattcatatatccttggaaatttatgcacaaaaaaacccgggctgctttgagcatccgggttgttcgtcttatacttcttcacaatattcttcaaaggcttcctgcagctttgccactacagccatcggctcatggccttcaatttcatgacgctctaccattttcatgatctttccgtctttcaaaatcgcaaaggacggagaagatggtggataaccttcaaaatagtcacgcgcacgcgctgtcgcttctttatcctgtccggcaaaaacggtgacgagctgatcaggtcttttatcatagtgaacggaatggtaggctgccggtcttgcaattcctccggcgcatccgcaaacagagtttaccatgacgagcgtcgttccttttttcgtaagtgcctcatccacctcttcggctgttttaagctcggtgtatccggcagctgttatttcttgtctcgcttggcggacaatatcattcataaataaattaaagtccatgttcaatgaagacctctcctttttcatcatctgttcttatgatagcaaggaaacgtccatatcggcaaatgactttgcttcgccgtgcactttttttgctcttcgtttactgcttacagaaaaaggggattatataaccagaagtaaaataaaggagcagttgtatatgagccaccggaaagcgttactgattcataacggaaatgccggcaacaaaaatatagaaaaagcacttggtgctgtggtgccggttttatctcaccatttagatgaggtgattattaaacagacaaagaaaaaggatgatgcgtatcatttttgccgatccattgatgattctgtcgacaccgtcttcattctcggcggcgacggcacgatccatcaatgcataaatgctatcagcgctctagaaagaaaacccgctgtcggaattttgcccggcggcacgtgcaacgacttttcaagagtgcttggcatccctcaaaatcttgcaaaggccgcggaagcacttatggcgggaaaaaaaaccagcgtagacgtatgtcagatgaatgaccgttattttttgaatttctgggggatcggcttaattgcagaaacgtcgaatcaaatcaacgaaacggaaaaagcattattgggaaaaatcagctattttacaagtgccttgcgaaccgtctcatctgctgcatcgtttccgatgacattaaaaattgatggagaagaaattaaagaagaagccgttatgctgcttgtgatgaatggccaatacattggaacgaatcgaattcctctgcccgatgccagtattgaagacggcttacttgatgttctcatatgccgcaataccaacctcaccgcgctgcgggagctgatgagcatggaacaaggctcaattgatcgttttactggagagttgtcctatgtccaggcttcccgtatcgagattgaaacagacactgccaaaaaggcggatatggatggagaagtttatacacatacacccgcagtcattcaggtcctgccacagcatatcgacatgcttgttcccgcaaatgaataactgtcataaggctttagaaagattttgcaaatccgttgactctcccctaggaggaggtcttacagtataagggatacacacttgaaaaaggggaagtcatatggagaagaaaaatattaccttaactatattattaaccaatttatttattgcttttttggggatcgggcttgtgattccagtaacgccgaccattatgaatgaattgcatttatcggggaccgcggtcggctatatggttgcctgcttcgctattacacagctcattgtctcaccaatagccggacgatgggttgatcgcttcgggcgcaagatcatgatcgtaatcggcctgttgttctttagtgtgtcggagtttttgttcggcattggaaaaacagttgagatgttatttatctcccgtatgctgggcggtatcagcgcagccttcattatgcccggggtcacggcttttattgcagatatcacgaccattaaaacacggccaaaagcgctcggttatatgtcagccgctatttcaacaggatttattatcggccccggcatcgggggatttttagcagaagtccattcccggctgccttttttctttgcggcagcttttgcactgttagcagccattttatcaatcctcacgctgcgcgagccggaacgaaaccctgaaaatcaggaaataaaaggacagaagacaggctttaaacgaatttttgcccccatgtatttcatagcttttctcattatcttaatttcgtcttttggtttagcatcatttgaatctttatttgcattattcgtggatcataaattcggatttacggccagcgacattgccattatgattacaggaggagcgattgttggcgccattacgcaagtcgtcttattcgaccgcttcacaagatggtttggcgaaattcatttaattcggtacagcttaattctctcgacgagtctggtattcttgctgacaacggtacattcatatgttgcgattctgctggtgacagtcaccgtatttgtcggatttgatctcatgcggcctgcggtaacgacttacctgtcaaagattgcgggaaatgaacaggggtttgccggcggtatgaattcaatgtttacaagtatcggcaatgtattcgggcctattatcggcggaatgctgttcgatatagatgtaaactatcctttctactttgcaacggtcaccttagccatagggattgcactgaccattgcttggaaagcgcctgcacatcttaaagccagcacgtgataagaagcgcattctttgtgtactgcaaagaatgcgcttcttctttatactgatgatagaaggagtgatggcatgaaggaatcgtattactcaattggggaagtatcaaaactggcaaacgtgtcgataaaagcgctccgttattacgataaaattgatttatttaaaccagcctacgtcgacccggataccagctaccgctattatacagattctcagctcattcatctggatttgatcaaatcattgaaatatatcggcacacctttagaagagatgaaaaaagcacaggacttagagatggaagaactgtttgctttttatacagagcaggagaggcaaatcagggagaaattagactttttatcagccctggagcaaaccatttcattggtgaaaaagcggatgaaacggcagatggaatatcccgcgctcggtgaggtgtttgttttagatgaagaagaaatacggatcattcagacagaggcagaaggaatcgggcctgaaaacgtgctcaacgcctcctacagcaaattaaaaaaatttatcgagtcagcagatggatttacgaacaatagctacggcgctactttctcttttcagccctacaccagcattgatgaaatgacttaccgtcatattttcacacctgtattgacgaataaacagatttcatcaattacgccggatatggaaatcacaacgatccctaaagggaggtatgcgtgtatcgcgtataatttttcgcctgaacattattttctcaacttacagaagcttatcaaatatatcgcggaccgccaattaacagttgtcagtgatgtatacgagttaatcataccgattcattactccccgaaaaaacaagaagaatatcgagtcgaaatgaaaatacggatcgctgaataataaagcatagaaaaagagcattttttgaaacaaaacttcaaaaaatgctctttttgcttatttagtaaacagatgtcttctcgtcaatcgattctaaaatttgtttcactcgtccgaggaatcgtccgcacacgagaccgtcaagcactctgtgatctaatgacaggcacagattaaccatgtctctgacagcaatcatgccattgtccatgacaaccgggcgtttgacgatggattctacttgaagaatcgcagcctgagggtagttgataatgcccatcgactgaacagacccgaacgaacctgtgttgttgacggtaaacgtgcctccctgcatgtcatctgcagtgagttttccgtctcttacttttttagctaggccggtaatgtctttcgcaatgcctttaattgttttttcatcagcgtttttaatcaccggaacaaataaagaatcctctgtggcaactgcaattgaaatattgatatcctttttctgaataattttgtcccccgcccacatgctattcatttgcgggaattcttttaacgcctgagcgaccgcttttacaaaaaaggcgaagaacgttaaattaaagccttctgtcttcttaaaagaatcttttatactgttgcgatatgcaaccatatttgtgacgtcgacttccatcatcgtccaagcatgcggaatttctgttttgcttcgcttcatattggaagcaattgcttttcttacacctgtgacagggatttctttatcaccggctgcagacgcaggatatgacgtctcttcttttggctcaggttttgatgcagacttcggtgcaggagctgctgttttcagctcctcaggattctgttcttgcacgccgcctgtttcaattaagcgctgaatatcttttcgtgtgatgcgcccgccggcaccagttcctgtcacttgatcgaggtcaatgccgtgctctccggccaaacggagaacagctggcgagtagcgctttttattgggctgatcggctgctccagcactttttgcaacagggttctcagcggcttctgatgctgctggctgttcttgtttttgttcagccggattcgcgccttctgtttcaattttgcaaatcatttctccgacttgcagggtttggccttcttctcccacaagctctgttatcgtaccagtaaaagaagacggaacctctgcatttaccttatctgtcatgacttccgcgatcggatcgtatttgttcactttatcaccgggggcgacaagccatttgctgatcgtcccctctgttacgctttctccaagctgcggcatcgtcatttgttcaattgccatgattgtatcctcccttacgtctttaaaactccgctaattctctcatcgccgcttccactttatcagggttgaccataaagtatttttccattgtcggcgcataaggcatagccggaatatcaggacctgcaagccgtttgatcggcgcgtctaagtcgaacagacaatgctcggatataattgcggctacttcgctcatgatgctgccttcttttgtatcttctgtgaccaaaagaacctttccagttttggacgcagcttcgatgatggcttctttatcaagcgggtaaactgttcttaaatccaccacatgcgctgaaatgccatctttttcgagacgttctgcagcttgtaaggcgaagtggacacacaggccgtatgtgatcactgtgatgtcgtcgccttccctttttacgtccgccttgccgattggcaggacataatcatcagccggaacctcgccctttatcagacggtatgcccgcttgtgctcaaaaaacagcacggggtcttcgtcacgaactgcggcttttaagagccctttcgcgtcatatggtgttgatggcatgacaattttcagtccgggctggttggcgaaaattgcttcgactgattgagaatgatacagggctccgtgcacgcctccgccgtatggcgctctgacgacaatcggacagctccagtcattgttgctgcggtagcggattttagccgcttcagaaataatttggttgactgccggcataatgaaatcagcaaactgcatttcagcaatcggtctcattccgtacattgccgctccgataccgactcctgcgattgcagattcagcaagcggcgtatccataacgcgctcttccccaaattgttcatagagtcccgctgtcgctttaaacacaccgccttttcttcctacatcttccccaaggacgaaaacgcgagaatctcgttccatttcttctttcatcgccaaattgattgcatcaatatatgacattactgacatttgttcttcctccctacttcgcataaacataatcaagcgctgactcaggagctgcatatggggcgttctccgcttcatccgtcgcttcatttacgattgccataatttcatccagcatggtttgttctatctcatcggacagcaggcctgtttcctttaagtaagcttgataagtaagcaggggatcactttttttcgcttcctctacttcttcacggcctctgtagctgctgtcatcgtcatcactggaatgtggtgtaaggcggtaagaaatcgtttcaattaatgtcgggccttctcctctgcgtgccctttcgcgtgcttctttaaccgcttgataaacttccagcggatcatttccattcacagttacgccaggcatcccatagcctatggcacggtcggaaatgttctcacatgcgacttgcttatcgtaaggcactgagattgcgtatttgttgttttcacacatgaaaataaccggcagcttatggacagcggcaaagtttgccccttcatggaaatcgccttggtttgaagacccttccccgaatgtaacaaaggctgcgatatcctttttctccatacgtcccgcaagcgcaataccgactgcgtgcggcacttgcgttgtaaccggagatgatcccgtcacaatgcggtttttcttttgtccgaaatgtcccggcatctggcggcctcctgagttcggatctgctgcttttgcaaacccggacatcattaagtcctttgctgtcatgccaaacgcgagcacgacacccatgtctctgtagtacggcaatacataatccatttcacggtcaagtgcgaaagccgctcctacctgtgctgcttcctgtccttgacaagagattacaaatggaattttgccagaacggtttaacagccacattctttcatcgatttttcttgctaacagcatggttctatacatatcaacggcttcctgatcagtcagccctagtgcttgatgtcggtttgtactcattcaagcccctcctttatgcttttaaaaatgaatggctttgccatctgcggcaagcgcagcttctccaattgcttcagaaagcgttggatgcgggtgaatcgtttgcccgacctcccacggtgttgcgtccagcactttggcaagacccgcttcagaaatcatgtcggtgacatgcgggccaatcatatgaacgccgagaatatcatctgtatctcggtcagccacgattttgacaaaaccgtcgctttcaccgtatacaagcgcttttccaatcgccataaatgggaacttgccgattttgacattatgcccgttcgcctttgcttcgtcttcggttaagccgacactggcagcttcagggcttgagtaaatgcacttcggcacaagcgtcggatcaagcggatgcggattgagacctgcaaaatgctcaacagcaataattccctcatgtgaagcaacgtgagctaactgcaggccaccgattacgtctccgattgcataaatatgagattccttcgtttggcagctttcattgactgaaatcatgccattttcagtaacaatatcggtgttctctaggccgatgccttcgatatttgcctgtctgccgatggaaacaagcattttctcagcagaataggtaacggtttctccgtctttttccgcttgtatgctgatatcgtctgatgtttttgtcattgtgtcaggcagcacttttgcccctgttatgaactggatgccttttttcttaagaagactttccatttcttttgaaatctctagatcttcagtcggcaatatgcgatccgcgtattcaataaccgttaccttaacgccaaaatcatgaagcatagacgcccattcgataccgataacccctccgccgacaatgatgattgactgtggcagctcctccatttggagcgcctcatctgaagtcagtacagacttaccgtccacttcaagacccggaagcattctcggtcttgatcctgttgcaatgatcacttgtttcgggatcagcatgtcattttcttcgccatttccccgctcaacagaaattgttcccggcagcggagagaagattgacggtccaaggatacgtccatatccggtgtacacgtcaatttttccttttttcattaaatgatttacacccgctgcaagcttatcaacaacggcttgcttacgctgctgcactttttcaaagttgagggacacgccagccgtttccactccgaattgatcggcttcacgagctgtccggtatacctctgcgcttctaagcagcgctttactcgggatacagcctttatgcagacatgttcccccgagtttttccttttccacaacggctgtttttaagccgagctgagcggctctgatggccgcaacataaccgccggtaccgccgcccagaatgactacgtcatactcagttgccatggtgactcactcctgtctgtctattcaatacgatattgtttggattgctcttcgccctgcaatactcttagcgccccttgggcaagagactgcagttcattttcacccggataaactaaaacgtctgaaatccaatctatgtatgatctgatagcagaaacaaagctttttccgtacgcaaggcctcccgtcagcacaatcgcttcaacttcgccttttaacgccgcgctggctgccccgatttcctttgctacctgatatgccatggcatcataaatgaagcgggctttttcatcgcccccttgaatcatctgttccacttttactgcatcatttgtaccgagatagcctaaaagtccgccggtgccaacaagctttttcatgatttcttcttttgtatattcccctgaaaaacatagatcaacaagatctcccgcaggcactgttcctgctcgttcaggactgaatggtccctcgccgtgcaggccgttattgacatccaccactcgcccgcggtcatggacgccaattgtaatacctccgcccatatgggtaataatcattttcatgttctcatatcgtttgccaagggaggctgccgctttacgagcgacagctttttggtttaacgcatggaaaatgcttttcctttcaatttcaggcatgcctgaaactttcgcaagcactgacatttcgtctacgacaacagggtcgacgatatacgaagggatattcaggccgtcagcgatttcccgcgcgataatgccgccgagattagaagcatgctgaccggcgtagccgcttttcaaatcctcaatcatctcatcattcactacgtaggtcccgccttcaattggccggagaaggccgcctcttgcgcagactgcatcaaactttgaaatattgattccctgttcatgaagcgtttcgagaatatggtttttacgaaattcatactgatcaataattcggtcaaatcgctgcagctcttctatgttgtgtctcaatgttttttcaaaaatgcttctttcgttatgaaaaacaccgattttcgttgaagttgagcctggattaattgtgagaatgcgtttttcgtcatgtagcactttcataacctccagatcaatttcttaacgtctgcttaatacactgtggccgttttgcaaaaactggcttcttgagcggcgcatgcgttcaatccgttcctctgctaagcggtcagccgctaaatatgcaggaatgccgtcacgctgagaaatctcaagtacacgctcgatattgccgtaaatgccttcaacttttttcaatgcacgttctgcattatagccgtaaagctcatctgccacgttgatgacaccgcccgcgttaatcacgtaatccggtgcataaacgatgcccatttcgtgaatttgatcaccatggcgtgtctcttttaattggttgttagccgcacctgcgatcactttcgccttcagctgtttaatggtgtcgtcgttaatagtcgcaccaagggcacacggcgcataaatatcgcagtcttgtgaataaatgtcatcaggatctaccgcacgggcgccaaaatcttcaactgcacgctgtacagattgtttgttgatatccgtaacgattaagtttgctccttcttcatgcaggtggcggcaaaggttataggctacgttcccaacaccctgtacagcaatggtttttccttcaagagagtcggttccgaaagcagctttagctgctgccttcattcctctgtacaccccgtacgctgtgactggggacggatttccagaagagccgaaagcaggagaaatccctgtgacatagtctgtctcatcatgaatgatatccatatcctcgaccgttgtgcccacatcttcagccgtgatgtatctgccattcagtccttgaatatagcggccaaacgcgcggaacatttcctcatttttgtctttgcgcggatcgccgataatgactgtttttccgccgccaaggtttaagcctgccgccgcgttcttataggtcatgcctcttgccaatctgagcgcatcttcaattgccgcttcttcattttcatatgtccacattctcgttccgccaagcgccggaccaagcgttgtatcatgaatggcgataatcgcttttaatccagattgttcatcctggcagaataccaattgttcgtaatcgtatttctccatatatttaaaaagttccatgttcgttcctcctaatgtgtgtattcttcagatgcgcatattgccagcgcaatggaatacagtttattttcagcagagtccgctctgcttgttaaagcaatcggtgcttttgctcctgtaatgacagccgccacgctggccttggcaaaataaatcagtgatttatataaaatattgccggcctcaattgttgggacgagaaggatatctgcgttgcccgctacgtctcccgaaatttttttctgggccgcggcaatttgtgaaactgcgttatccaaagcaagcggtccatcaacaatgcagcctttgatctggccccttttgtacatttgagctagagcagctgcattcacggtcgcttccattttagggttcaccgtttcgaccgctgcaagggcagctgcttttggcatattgttccccactgcatgggccacatgaacggcattttgcaaaatctgccggagctcttccagcgaaggagcaatattcattgccgaatctgtcacaaacatcagccggtcaaaatccggtatatcgaagacagccacgtgagaaaggacacttgctgaccgaagcccctcctgtctgttcaataccgctttaagcaaaacagaagtcggcacattgcctttcattaaaacgtccgctgttttatgatgcacagcacgaaccgctaatttcgccgattcctcaggagtattggcatggacgatttccacttgatgcccttgcatggatgatgtcagctcgttcagttttttgctgtcgcccgttaacaagaaacgggcggataggtgctcggctgccagctttacagcccggatcacttcctcatcctcagcatgagcaaccgcaatggtcttatttttgtgtatcgacgctttgccgattaaatctttcagcttcatctgttaccacctttcttgtttcgactccgccttttattatgcaagttccatgccagctcttaagggtgctgtcataccaggtataccgaaacattcgtgcagatgtttgcgtttattctgcaaattattgcatgccttcatttgcaaggccatatttatccattttgtaatataaattccgaatgctgacaccgagagcttttgctgtttttgtccggttaaaatgatgcttttcaagcgtttgctggatcaaatgcgcttcaaatttttctactgcgacagacagcttttcgccttcaatatccggaaaatcaaaacctgttccctgatctgtgtcattttctttttgctcaagttcgaatacaggcaagtgatctttttcaatccattccatatgcggattcagaaaaatcatggctcgtccaaggacattttcaagctcccggacattcccaggccaatggtaggcagataaggcgcgcaaggcttgctgtgagagcccttttacattcctgccgtaatcccggttgatcttttggataagtctgacgctcaatgcttcaatgtcctccaaccgctgccgcaaaggcgggatggagatcggatagcgattgatccggtaatacaggtcttcccggaatgttccgtccgccatcgccttttcaatatttacatttgtcgccgcgatcactctgacgttgacagggatcgctttcgtgccgcccactctgacgatttccttttcttgaaggacgcgtagcaatttggcctgcatattttgtgtcagctcaccgatttcatctaagaaaatactgccgttatttgcttcctcaaataaaccctttttaccgccgcgcttcgctcctgaaaacgcaccatcctcatagccgaacaattctgattcgagcaggttttcagaaagggctgcacaattcacgcgaataaatttattgtatttccggtcactttcgttatggatggcatgggcgaacagttcttttcctgttcctgattccccgcgcagcaagatggttgccggtgttttcgcaccgagcttcgcctgctcaagcgcaaccagcatttgctcgcttttgccgataatgtcgtcaaacgtgtatttcgcttcaagcgtgcgaataatttgtctggcgcgattaagctccgctgtcagcattttaatttcggaaacatcgtgaatcacgccgacgctgcctttcaaaatcccgtccacaatcaccggtgctacattaacgatcacttctttttcattcgggccgaccttcattctgacaccgcggacaggacgtcttgtttcaagcacctttaaatgcatgctttcgccttcggaaatatcagtgtttgcaggcttgccgatgacttctttttcagaaagccccgtcattttcgtatacgctttattgattagcaggccgatgccgttttcatcaacgacagaaatcgcctcatcggaggattgaataattgcctccagcatcgtacggacctgctttaagttggtcacttcctctgccagctcgaccgcatcagtgatatctttaaacacacaaagagccccgagcagacgtccgccttcatcaataatcggcagtcttgtggtcacaatttgcaaatgatcgcctaacagctgcttctggttgtattcaggcactcttgtttttaaaatccgcggcatcttagtgctcggaatcacttcttttattgggcgcccaatgacttcctcacgtttttttccgaccattttttcggccatatggttaaagagaatgatttcttcattgatatcaataaaaatcattccatcatgggtggaattaaaaattctgtcatatttataggtttgctcttttagcatttgaatcaggtgctgcttttcttccatcagctgaaaaacgatgtatgccatttttcccggcatgacaatggtatcttcatgctttctttgaaggagctcgtcaaacacggcttgatcgccggtagtatgaatgacgatatccggtttttgttgtatgtaaggtttccaatcagatgatacggcaatcccatactgttctgcttctttcaatcccggcgcctcggggtctttgtcaactacggcaatgatatctatgatggctgttttaatcagaatatgtaataacgccgttccccttttgccggcacctactatcagtaccttttgcatcccgatacccctttgtatgaaaaaatttgcacacctatttattccgttgcaataatttgcacaaccctatgttaccacgttttcttctcttgacaaaatattttttccgctggacaataaaggaaatgaaaagataaaggggttttctgaagatgagccgacttcttgcgcttttaatattagtcatccccggggctatttctgctttaggcattaaactgatgagagatacacttttcggccatacaatcaagccattttcagctctttggctccaagggttgtcaggattcatcttttttgcgatcggcctctatgtgctggccgggttcattttatacagagacagaaaacgcaatcaagtcagcccgcgattcagaaaacgatagctgaaaaaaagccggagaatgctccggctttttttgttgcattattcgtcaggcaaaacggtcttggcaatcgttttgtctaacgcttcatagtcataataagaaatcgtatcgtacagttcttttcgtgtctgcatatcatgaagtccttctttttgtgagccgtgctccttcatcaaaccaaacatccgctcacaagcttttgccgccgctcgaagcgaggtgacaggatatatcaccatgtgaaaccccatatcttcgaattcatcggcacgataatatggcgttttcccaaattcagtcatattcgcaaggagcggaacggggatacgctcagcaaactggcggaattcattctccgcctgtagcgcttccgggaaaattgcgtccgctcccgcctcaatgtaagcctctgaacgttttattgcggcatcaagcccttcctgcgccctggcatcagtacgggcaacaacaataagggagggtgccgcttgtttaatggcttttattttttgcgccatttcctttatcggaactagctgtttgccatttaaatgtccgcatttttttgggagctgctggtcttccatttgaacggctgctaccctggcttcaagcatctcccgggctgttcgggcggcatttaagacaccgccaaatcccgtatcgatatccacaagcaaaggcagatcagctgcacgcacaagatctttggcccgttcagctatctctgccgatgtgatgatccctaaatcaggcagccccctgctggctgtataggcagcaccggacaaataaatagcagaaaaaccggcttctttcgcaagcaaagcggccatcccgtcatgggcgccgggaatttgaagaatgtccggtgctgacatcagcttgcggaaacgcccggcaagctcctcttgtgacgattgcttattgacgatccacgacatgaaacaaaatcccccttttacatgcagaacatgtctacgaattcatttacgcgcatcgtttgtaatgtctcatagctggtacagcgctcataaatgtgtttgtgctgtttatcaggaaaatgggttttgagattgtcagaaaacttttccagcagtttcggcactgcttcctctcttcgaaaacgatggccgaggggaaactcacattccaccatttccgtgctcgttccatctttaaaatgaacctgaacggcatttgagatggagcgtttatcaggcttcaaataatcctcggtatatgttttattttcagtcacttccattttatcacgaagtttatctattctcggatcattcgctgtttcagcttcataatgctgtgcggtgatatcaccaaaaagcaaaccgattgctgtaatgtattggaggcagtgatcacggtctgccggattgtggagcgggccttttttatcaatgattcggatagctgattcatgcgttctgatgacaactcggtcaatctcgtcaatccggttctttacctgcgggtgaagaatgacggcggactccgccgctgtctgggcgtgaaattccgcaggataagacactttaaataacacattttccatgacataagcgtcgagcggacgggcaagcttgatctctttcttattgaataaaacgtcttggaacccccaacccggtgcactcaaggctgtcggataacccatttccccttttaacgacatcagcgccaaatgaacacctctgctcgttgcatctcctgccgcccatgatttacgcgagcctgtattcggtgaatggcggtatgtcctcaatgctgcattgtcaatccatgcattcgaaagcgcatttttgatttcttctcttccgccgcccaaaagctttgctgcaacagcagttgtcgcaactttgacaaacagcacatggtcaaggccaactcgatttaagctgttttctaacgccagcacaccttggatctcgtgtgctttgatcatcatctcaagtacgtcgcgtaccgttaacggctcttttccttcagacagcctcactcttgatacataatcagcagcggcaaggattcctcccaagttatcggatggatgcccccactccgccgccagccacgtatcgttgtaatcgagccagcgaatcatgcagccaatattaaacgctgccctcacaggatcgagaacatatgacgttcccggcactttgcttccattcggcacagtcgttcctggaacaatcgggccaagcagctttgtgcattccggataccgtagcgccaagattccgcagcccagggtatccagcaatacatgccccgctgttgtatacgcttcggcactagtaatctctttctcaagcacatagtctgtgatttcttcgataacacgatccgttttcggcattctaccagctcctttcatgattttgtttgatatcgcgggcccatgtaactgacacggggacggaagagccgattattggcatgctgttcgatcacatgggcgcataaaccggacgttctcgcgctgaaaaagatcggcgtatataaaggaatcggtatgccgagcatccaatacactggggcagcatagtaatccaaattcgggtaaagccctttttccttctccatcagccgctcacccgcttcgcacatctcatataaacgatggtcaccggctttatcgcataattgctgcagcgcctctttcatcatgagtgctctcgggtccatttttttcatatacacccggtggccgaagcccatgattttttcttttcttttcagttttgtttgcaaaagctgctcaaaatcagatgtcgtttttgcctccaaaagcaaatacatcacagcttcgtttgctcctccgtgaagattccctttcagggaagcgacagccccagtcaaagccccataaagatctgaatgtgtagatgcaatgaccctggccgcaaaggttgaattcggcatctcatgctcactgtacaggacgagcgaccggtcaaaaatctgttcttccaatgaagacggcaatttccctgtcatcatgtagagaaaattcgcactgtaggatagggtttgaagcggaagaatcggttctttcttattaatgatcctgtagctggcagcagtgagggcaggcattttcccaagaagctgataggcgcgttctttgtttgcggaaggagaccgatcatcaatttgccgatcatagccagcaagtgccgacaggccggtacgcagaccatccattggatgagtgtcctcagggagcagctcaagcagacggagatgatcagcaggcaggcttgaggcactgtttattttacgttccagcgtttccatttcactttcttctggcagcctgccctccagcaataaatggacaagctccagatagctttttgtttcagaaagttctattaaatcatagcctcttatcaaaatctggctggactgcgtgtcaagataagaaatatgagtttctgccgcaatcacaccgtccaaccctggagaataatgctgtttctcctccatatcctcaacctccgtttttgcgttttttgtctatcaggttccgccaagcaaatacttggaaataatcagtctttgaatctcgttcgtcccttcataaatttgcgtcacctttgcatcgcgaagcaggcgctcaactggataatccttcatatagccatatcccccataaatttgaacggcgtctaacgccgcctttacggctgcatcggaagcaaattgtttagccatagacgcttcttttccacagtttaggccgcggttatgaaggtctgcagcgtggtagacaagatgtcttgccgcctcagctctagtcgccatatcagccagcttaaatgatatgccttgattggctgcaatcggccttccaaattgcactcgctgcttcgcataatcaacggcatgctcaagagccgcctctgcaattccgagggcctgtgccgcaatgccgatccggccgacatttaaattcgccatggcaatgtgaaagccatccccctctttgccaagcaaattggcttcaggcacttctgcattatcaaaaatcagttccgtagtattggagccataaagccccagctttctttctttttttccaacggtaaaaccgggtgtgtttttttcaacaataaaagccgaaatcccgtgcctgccttgatctggagctgttaaagcaaatgtgatatagatatcagctgctccgccattcgttatgaatattttcgatccgtttaataggtatttgccgttctttttgattgctgttgtgcggaggctcccggcatccgaccccgagtgaggctccgttagtgcaaatgcgcccaaatggtctcctgacgcgagatttggtatatatttcatcttctgttcttcgttgccgaaatacagaatcggattcgtgccgactgaggtatgaacggagagaatcacgccgacagccgcgctgattctagaaatctcatgaattgccaaaatataagaaacaacgtccgctccagcaccgccgtattgttccggcaccggtattcccatcagtccgtgtttacccatttttttgatcagctgaaagggaaattcgtccgttttctccatgatttccgcagcgggagcaatttcttttcgtgcaaaatcacgcaccatttttcgcatcatgacttgctcttgggttacatgcaactcggccacccccggatggaatagacttcaggaagtcttctcctcatagtcataaaaaccgcgtccgctctttttgccaagccagcctgctttgacatacttgcggagcagcgggcaaggacggtatttggaatcgccaaggcctgagtgaaggacttccataattgataaacacgtatccagtccgataaaatccgctaatgcaagcggacccatcggatgattcatgcccagcttcatcacttcatctattgcctccggcttcgccactccctcatacacgcaatagatggcttcattaatcattggaagaagcacacggttggaaacaaacccaggaaaatcattgacttctaccgctgttttccccatcttttccgctaatgccataacatctaaggccgtttcttctgatgtagccaagcctcgaatcacttctaccagcttcattacagggacgggattcataaaatgcatgccaataacccgttgaggccggtttgttacagcagcgatttctgtaataggcaaggaagatgtattgctggccaaaatcgtatgaggcgggcaaatgcgatcaagtgttttaaacatctcagtttttgccgccatgttttctgcgatagcctcaatcacaatgtccgcatgctctgcctcctcaagtgtttgagaaatcgaaatgcggttgattacgctcttcacttccgtctcggtcctttttcctttctcagcatcacgggccagctgtttcttcagccgtttcaatcctgcctccgcggcctctggattcacatcatacatccgcacataaaagcccgcgtcggcggctgtttgagcaattccgctccccatctgacctgcgccagctaccatgatttgtttgatttccattcaaatcccctttttcatcatgttttaatgaacctgcactaagacggcgtctccctgtgctgccccgctgcaaatagcggcaacgcccagaccccctccccgtcgctttaattcataaacaagcgtcatgagaattctcgcaccgctcgcgccgatcgggtggccgagcgcgatcgcaccgccattcacatttactttttcaagatcgaaacctacgattttttcacatgtcaaaacaactgaagcaaaagcttcatttacttcaaacaagtcaatatcttggacagttaaaccattctttttcaggagcttgttaatagcaaaccctggcgctgccgccagctcgtgcgctggcattcccgtagttgaaaaaccaagaattgtagccagaggccgtttgccaagctcagcagctttttcctcagacatcagcacgaacgcgccggctccgtcattgactccaggagcattgccggctgtgatagaaccgtcacttgcataaatcggagcaagttttgcgagctgatccagacttgtgtcacggcgaatcgcttcatctttatcaacaacgtttggttttccttttcgaccgatccagttgacgggaacaatttcatcctgaaacttcccttcatcggcggccttagctgcccttgcatgacttctcaacgcccattcgtcctgctctcttcgtgagattgcatattccttggcagctgtatttccgtgaacagccatgtgcacctcgtcaaatgcgcacgttaatccgtcatacaccattaagtccctaagctcgccgtcccccatccgtgctccccagcgcccggcgggaacggcatacggaatattgctcatgctttccatcccccccgcaacaagtatgtccgcatcctgcgcccgaatcatttgatcacataaagtgacagcgcgaaggccggaagcacagactttattcagtgtttctgacggcacactccaaggcattcccgccagacgggcagcttgacgggaaggtatctgccctgagccggcctggacaaccatgcccatgacgtttccttctacatcatctccagagactccagcctgttgcagcgcctccttcatcacaatgcccccaagctcagcagctttcacctctttcaaaactccgccgaatttgccaaatggagttcttgcagcacttacaatgactgttttcctcatggtttcacctcattcagaagatagacagcgcttacaatttctagttgtcttctatgaatgtatgctttgaaacgggcatgaatgaatgaaaaaagaaggctgcgtcaaacagcctccttctaacaactattcatttttcagcaatgccgaagccttttctggaaagtcggtaaacatgccgtctgctcccgcttcaatgagacgcttcatatcttccggacgattgactgtatacggccttaccttaatcaaaccgttcctcattttcttcagtacttcatctgtgacccctgggctgtttatcttcgggtgatagccggaagccggaatagacgcgatatatcgatctgcctgataaagcacatctgaagttaatactgcccgttcgatatgcggtgcaagccgggcgcacagcgccaagctgtcatgattaaacgtggataggatgactctgtcctctacattaaatcgcttcactgcctccagcactttttcttccattccctcatagcggatcacgctgttttttaattcaatgttgatgagaaaatccttttttaccgcccacgagagcacatcttctagcagcggcacttttatatcgctgtacgcttgatcgtgaccagcggccgcattcgcagtctttacctcatcataggctgtatccttcacgaatcctttaagtgatgtcgtgcgattaagtctttcatcatgaattacaacaatgcgtccgtctttcgtcagctgtacatcaagctctatcccatccgctccggcttcaattcctttttcaaatgcaagcattgtattttcgggaaattgacctgatgccccccggtgggcaaaaatctttgtcatcgtttcacctcaaaccctaaagttttctccattatacttattttgtcggctccactctaggattaaggctgtatcaatctactgatcataataagaatcaatgccattgacaatcgcatctgcggccttttgctggtattcttcacttcccagcttgtccgcgtcagagctgttcgtgataaacccaagctccgccaacacacttggcatttgtgaatatgtaatgacgtaaaagtctgattctttcacgcccctgtctctcgtttgtaaggaagaaacgagctgtgactgaatatcggatgccagacgccggctgttctccccttcataatcagattgaaaatacgtttctgttcctgaagctgaagcaacccctgaattcacatgaatgctgacaaaaaggtcagcctgattggcacttgccttagccactctttcctccaaggtcagaaaatgatcgtcagaccgggatgcaacaggattggctccctcctcttttagtttgtctgtcacatgctctgagacagccaaattaatatccttttcaaagagcccgtttccgaccgctccactgtcttcaccgccgtgtccggcatcaatatacactgttttcccttctatcggctctgctgcctgtgcacaaggcgcgagcgtcaaagccaatccgcacagcgccaagctcctccataacattctcaacttactccctccggtcacgagttctttcgcagctgaatatcttccagctgtaaagttccattatccttctttgtatatttcaccaggacatgtgtctgatctggcagtgattcacattcatcacgtttatccttcggaacttgtatcatggtttcttctccattaagagaaaccgcaatcgtatgaggatcagccgagccaatgtattttccctcttcggtaaacctcggcactgagtcatccgcacttgcaacactgcaccccgaaagaaagagcgcagtaaacagcaaaagaaccgtttgtttcacatgaccacctcttcctgatgtttggcttttatctttgaccagaatggagaatttgtaaagacaacgcgaatgcaggcgagcaagttccatgattttcaaaagggctatacgacccgatcatttcctgttgttagaaagataacgagcagatttgtctatgaggatggctctaattgaggcgccaattagaaaaaattagcggaaagaagcaactttttattcattttaaaaaatttgagaatagggtgagcaaatcgtttgacgggtgggtcagccaagcgtaaccttttaaaggatatttactttattgaaagaagttaaagccatgaaaaaattcgttctgctgctggcggcagctgtcatcacatgctccatcggccaccaaatcagtggcggctacaaaggccccgaaaaagagcggccaaaacatcactctgcactcaagatattcagtcggtaaagcagatcaattgcattaatttttacatataggctagaatatgtgcgaatccaaacgaaagaagatgatcaaatgaatcctaagtataagccactttttgaaccatttacgtttaaaagcggcgttacaatcaacaaccggatcgcagtagcaccgatgactcattacgcttctaatgaagacggtacaatatctgaagcggagctcgactacatcatcccccgttcaaaagagatgggaatggtgattacagcctgcgcaaatgttacaccggacggaaaagcattccccgggcagccggccatccatgacgattccaacattccaggtttaaaaaagttagcacaagccattcaggcacaaggcgctaaagctgttgtacaaattcatcacggcggtattgagtgcccgtctgagctcgttcctcaacaggatgttgtggggccaagtgacgtgtttgataacggcaaacaaattgctcgcgcattaacagaagaagaagtggaaaacattgtgaaggcgtttggagaagcgacaagacgcgccattgaagccggctttgacggtgtcgaaattcacggtgcaaacggctacttaattcagcagttttattctccgaaaaccaaccagcgcacggatcgctggggaggaagcgatgaaaaacgattagccttcccgctcgctattgtcgatgaagtgaaaaaagccgcttcagaacatgcgaagggtgcattcttagtcggctaccgcctgtctccggaagaacctgagacaccgggattgacaatgactgaaacttatacgcttgttgatgctttaggggataaagaattggattatcttcatatctcactgatggacgtgaactcaaaagcgcgccgcggtgcagatccgactcgcacacgcatggacttattgaatgaacgtgtcggaaacaaagtgccgctgatcgccgtcggttccatccattccgctgatgacgcgcttgccgtcatcgaaaacggtattccactggtcgctatgggacgcgaaattctagttgaccctaactggacggtaaaagtaaaagaaggccgtgaaaagcaaatcgaaacagtgatcaaaggcacagataaagaaaaatatcatttgcctgaaccgctatggcaagcaattgtgaacacacaaggctgggtgccttataaagattaatgtgcaaagactgccgaaacgattcggcagtcttttttccctttatataaatagtttgtgtacacatctaaacagcaaaagaaagagctccccaccaacttcgaaaagaaaatccaggaaaaacccctcacgctttcttgcttttttctttttcattcgtacgtctcctttttacatgaatacgccttacttacgattttgcaggagaaaggtttcattttataacggacacatctagggtcgatcatgcttcgtgatcctataagatgtatgaatggaccaagagtgcaggtaataccgccatttgctttccttacttttcaaacctatcctttactatatgcggatacttaatattcttctcccatactacaaatgtccccaaaacaaaacgcctcctatttatcagcgcaaactaataaataaaagacgtttgatttaatgaccacttaataagctcatgtttaagaagccttatgctctaacctcagcttatccgcaaccattgcaatgaattcactgttggtaggtttagcttttgtcatgctgacagtataaccaaacaacgaggaaatggaatcaatgtttcctctgctccatgccacttcaattgcatggcggatcgctctttctacacggcttgcggttgtgttaaattttttggcgatgtccggatagaggacttttgtaatgctgccgagcaattcgatgtcattgtataccattgagattgcttcgcgcagatagagatagcctttaatatgggctgggacgccgatttcatggataatgcttgtgatgctcgcgtcgagatttttcttctttggttcaggctggctgctgcgtataatactgctttgcgatgatggcgcacgatgcgtcacactgctggcatttccgctgacctggcggatatggccgacaaggttttccatatcaaacggtttgagaataaagtaggacgcgcctaaatcgacggcctttttcgtgacatcttcctgcccaaaggctgtcagcataatgacattcggctgttttttcagatctgattccctcagcctctctaaaaccgcaagtccgtctagatgcggcataataatatctaatacgagcacatcgggatctttttctttaaacagcgacaggcattcctgtccgttataagcaacgccgatcacttccatgtcttcctgtccttctatatattcacttaacaggcttaccagctctcgattatcatcagcaacacaaactttaattttctccacgtttcttcctccccaaatgtagttaacaggattcacccttgctacatgtttacattcgacaaaaccgctatataccctctaaaaaaatcataatcaccaatattagtggcatatctttgttattctatgtttttctctgtttttcgactaaaaatgaaatttgacaaacaaggaaacgtgaatttgtcgaaaaatcttcttttgtatattttaccgtatgtattctgagaagtgaagagggatcaaaataaaaaaactgccggaaactccggcagtcagcttgctttttcttttccataaatatcgattcctgcttctgacagcatccattcaatatgaacaccgtagccgcttgtcgggtcatttacaaatacatgggtgacagcaccgatcacttttccattttgaatgatcgggcttccgctcatcccctgtacgatgcctcctgtttctttcaacagtcttggatcggtaattttcaacaccattccttttgtcgcagggaatttttgcggcgttgtgctgacgatttcaatatcgaatttttctactttgtcatcatcaataaccgttaaaatttcagccggcccttttttgacttcggtagaaaacgcaaccggcaatgcttgatctgatatgttgttttgaatcggctgatgcagtgtgccgaaaatcccaaacgggctgtttctgttaatatccccgatcgttttgcgttctgaggaaaatcgcgccagtttttctcccggattaccgcctgtccctttttcaattgatgttacagtggatttaacgatttctccattctccactacaattggtttctttgtgtccatatcggaaatcacgtggccaagtgctccgtatttttttgttttcggttcataaaaggtcatagtgccgatgccagcagcagaatctctgatatataacccgattctgtatttgccttctccttcatccttttctgggatcagcttcgttttgattttctgtttatcacgtttgatcagtaagtctaaagattcaccagttttcccagccttttgaataaatggggctacatcattcattttttcaattttctgtccattcatctcaataatgatgtcgcccgcttcaattcctgccgtttctcccggagattttttgccttcacttgtattgatttgatgaaatccgacgacaagaacaccgacggaatgaagttttacaccgattgattgtccgccaggtataacttttaaatcaggaagaacatgcacttttgtttttttaattggaaatccggcaagatcatataccaattctgactcacctgattttttgcccgtcaccttgatttcatgcggatctttctttactgtaaacgcttctgaggattctgatgtctgagcgtttaccgataaactcgtttcaatcgcttgtgtttgggtttcaaatactctcatttgcgttggaatcagtaaatattcttttagcggtttgcataaacctacacttaataacgaaacaaggagaattaaacctactgcttttctgatgttatcgggcattcactacttcactctcctcgctcctatcccacaccttctttatgacttgctgctacatcatttaattttgccttctgacggcttatttataactgtcatatgaagaaaaacattggatatactgatgaacgaatggatgtgcacgaaaaaaataagctgcgcttctcgcgcagcttacccagttgttttgacttgatccgcttgttttaaaagttctttcgcatggcgtttcgttaagtcggttacttcgacacctgcaatcatgcgcccgatttccgctaccttttcctgcttagagagcggcttgacacgtgtcgtcgttctgccgtcttttaactccttcgcaatataaagatgcgtatcggccatggcagccacctgaggcaggtgtgtaatgcacagcacttgtgatcctattgacaccttatggatcttctcagcaattgcctgtgcgaccctgccgcttacaccggtatcaacctcgtcaaaaatgatcgatgtcacatcctgttgtgaggaaaaaatgctttttatggcaagcatcacccgtgacagctctccacctgaagcgactttcgaaagggatttcagcggctcgcctgtattggttgaaattaaaaacttcaccaggtcaatcccttgttcagtcagctgaacgggctggccgtttacaagcggcgcctcttcattgcgtgacgctgttctgaccttaaattccgtatcaaaagttgatttttccatgtacaggctttttaattcccgatgaatctcatcagccagctttttcgcccatgtttttcggatttgtgacacatttgccgcttccactgcgacatctttgccgacggagtcaagctcctttttcaagctttgaaggtggctgtccctgttttcaatttggtcaatctcttcttcaattttagaagcatattccaaaatgtcttcaacagtggcaccgtattttcgtttcagctgtttgatttcattaagtcgcgtctcaatatagttcaggcgttccggatcaaattcaagctcatccagcatatttctcatctgaaatgtggcatcctcaagcaaatagtaggagttcgaaacactttcggacatttttttcagcggttcgtttatatcagatatatcttcaagctgcgctgatgccattccaacccagtccaatccgccctgctcactgcgaagcgcgttatatgcattttgcagcgactcatatatcttctcaaagtttgaaatttgctggcgctcttcttggagctgttcatcttcgttaagctcaagctttgccgattcgatttcttcgagctgaaattgaataagatcaagacgatgggccatttcctgttcgctttcagaaagctgcttaagctttttgagcagcttcacataccgctggtacccttcctgatacgttttgagcgcgctttccacttcggccccggcaaacttgtccaaaagctggagatgattttcgtcttccattaacagctggttatcgtgctgcccgtgaatatctaataaaagcctgccgatctctcttagtgaagcaatcgtgacaagcttgccattgacacggcaaacgcttttcccgctcgtgctgatatcccttctcatgacgatcatttcgtctgaaacgtcgattccctgctcagcgcatacgcctaaaacaggatggccgctctccaacagaaacagcccttcaagttcggcttttgcttccccatatctaacaaattcagatgatccgcggcctccgactaaaagagaaatggcatctatgatgatggatttgccggctccggtttctcctgttaaaaccgtaagcccgcgttcaaaagaaaccgtcagttcctcaataatggcaaagtttttaatcgatagttcagctaacaaacagcattacacctcttatctttgttagattttctgttacagcagttcaaggagcctgttttttacgccttctgtatcttcaggagtccggcaaataattaaaatcgtatcatctccgcaaatggtccccatcatttcatcccagtccaaattgtccatcagcgccccgattgcctgggcattgcccggcatcgttttcagcacaatcatatggcttgctgagtctattttcacaaatgcgtccatcaatgcccgctttagctttgacagcggattgaaacgctggtccgccggaagactgtatttgtaagaaccattatttgtaggcacttttacaaggtgaagttctttaatatcccgtgataccgtggcctgcgttactttgtatccatcctgctttagcatgtcgaccaattcatcctgcgtttcgatttcattgcttgtaatgatctctctgattttaatatgcctctggcctttgttcatgtaagcacctctatttccaagcttatctgttcttttatgttatatgattctctgcacattgtacatgaatgcagaaaaaaggaataatagcgccctattattccggtacatctgcttttttttcttttaacgtcttatgtgcttcttctacaacgcgcatgatctcttcttccggcagttcctggccttcctgtccctctcccggccaatgcaaatgaaggagaaactcaatatttccgtctcctcccgtgattggagaaaatgacaagcctttacagatatagccttcagcggcagaaaaactgatcattcgcttgagcacatcagcatgcactttaggatctctaacaatcccttttttgccgacggattcccgtcccgcttcaaactgaggcttaactaaagccatgcagtcgctgcccggtacgagcaaagtccttaggacaggcaggatgagccgcagtgaaataaaggacacatcaattgtggcaaactccggcatgccctttgtaaagtctgccggtgttgcataacgaaagttcgtccgttccatcacgacgacccgttcatcctgtctaagcttccatgcaagctgattatagcctacatccacagcgtatgactgtttagctccattttgcaaagcgcagtccgtaaaaccgccggtggaggagccaatatcaatcataattttatctttgacagagacgggaaattccttcaacgctttttcgagctttaagccgcccctgctcacatacctcagcgggtttcctttgacagttaacggaaggtcgcggtcaattttttctccaggcttgtccaagcggttttcgtttgaatagacgatccccgccataatggctcttttggctttttcacgcgtttccgccagccctctttccactaataatacatctaatcgttctttctttgacgtcatgatccaattcctttgtgtgtctttggtggcatcagtaatctaatacgatttgccacctgctgttttgtcagtccaatttcctcaagaagcgctgttacacttccgtgttcaataaaccgatcaggtatacccattctgtcaatcggagtatgatattcaccttgatcatgagcgaattctaaaatcgagcttccgaaaccgccttctaagaccgcttcttcaattgttaaaattggcaagccttcttttaggatactcttcatcatcttttcatcaatcggcttaataaaacgcgcattcacaacgcgcacggaaaggccttctttctgcagctcttcggctgcttcaatcgccatttcgattgttgtgccgaatgttaagatgacagcatcgttccctggacgcagcacctcccacgtaccgatcggaatcgttttcaactgttcatccatttttacgccgagtccgtttccgcgcggaaaacgcattgctatcgggccttcgtcatagctaagtgctgtatgaaccatgtgctggccttcattttcgtctttcggcatcattaagaccatgtttggaatgtggcgcataaacgcaatatcaaacacgccttgatgtgtctctccatcagcgccaacgagtccagcacggtcaattccaataaacacattagcgttttggcggcagatgtcatgaacaacttggtcatatgccctttgcaggaaggttgagtaaatcgccaaaaacggcttcataccctgcattgccatagctgcagccattgttgcggcatgctgttctgcgattcctacgtcgaacatccggtcagggaattcctttgcgaagccttcaagctttgaaccgacaggcatagccggcgtaatggctacaatgcgtccgtcctcgcgcgccattcgctgcacagttccgctgacaagaccgctccacgaaggagctgcggctttcggctttacaaagtcaccggtattaattttatatggtccggtaccatgccatgtcccaatcgtatcggtctcagccggtttgtaccccttcccttttttcgtaatgacgtgcagaagaacagggcctttcgtttttttggcgtattgaagattctcaatcagctcatgataagaatgtccgtccactgggcccaaatacgtaaaaccgagctcctcgaaaaacattccggagacgagcatgtatttcaggctgtctttgacccgttccgccgtggcggcaagcttgcccccaactgccggaatctttttaaataagtattcaagctcatctttgacccactggtatttccccgcagtgcggagccgtccgagcatagagtgaatggcaccgacgtttggcgcaatactcatttcattatcattaaggatgacaatcatgtcttttttctcgtcgccgatgtggttaagggcttcgagcgccataccgccggtcagcgcgccgtcaccaatgatcggaataatatattcatccgttcctttaatatcacgggcagctgccattcccatcgcgcctgacagagaagtcgagctgtgcccggtttcccaaacatcgtgctcgctttcactccgctttggaaatccgcaaagccctttgtactggcgaagcgtcgcaaattcttttccgcgtcctgtcagcagcttatggacatacgactgatggcctacatcccataaaaatttgtctttcgggctgttaaattccttatgcagggcaacagtaagctctacgacacctaagtttgggccgatgtggccgccggaagcggataaacttgtaattaaaaactgacggatttcatcacttaatttctctaattcatcaatggacatgttttttaaaaacgacgggtcctgtattgataaaagatccaaagcggatcaactcactttcagcatgaatttctgcaatgatacatgtcttttgcatgccgagctgacaataatctcagacataaaaaaagacaaacgcgcttttccttttcatttttcatataaactgcttacattttaccatacctcgtgcagccgcttcaaattaggatcgttttagtgatctcttgccgcaattaaatcacaaagctcatataaaaggtctttttgaagagagagtccgccgatcaatcgcttcgcctcttttatatgaacatccaatttatgtttggccccttccaatgaaagaagcgacgggtatgtcgatttgtcatttgtggtatccgagccgacacgtttgccgattttctcttcactgccttctaaatctaaaatatcgtctctgatttgaaatccgattccaatgtggctgctgaaggtacgcagtgtttcaatgtcttcctcaggcgcatcagccaaaatagcaccggcgattacacaaaagccaaggagcttggcagttttccgttcatgaatggattcgagctcttcaagcgtgacttgtcggttttccgcttccatatcagctacttgcccaccgaccatgccttcggtgcctgccgctgaaatcagttcattcacaagccgcaggcgcttttctgctgacacctcgtctgacacgtgggaggtaatcagcttaaagctttctgtgagcagcccgtcacccgctaatactgccgtcgcttcaccaaacactttatggtttgtcggcttcccgcggcgcaaatcgtcatcatccatgcatggaagatcatcatgaattaacgaatacgtgtgaatcatttcgacagcacagcccaccggaatgccgtctttttcgctttttccatatgcatttaaaacagccagtacaatcagaggccgcaaccgctttccgccggcctgtagagaatatagcatagatttctttaatgagtccggcatatcaagcttttctgtatagacagaaagctgattttcaattgtttttttccggtccgccagaaagctcgttaatttatttgtcaccttcgtcttcctcctgaacactgaaaggtgccagttcgccgtcttcttttaaaatgaagtccatttgcttttcgactttttgcagcttttcatggcacatttttgacagagccatgccttcttggaaatagttaatggcttgctctagaggcacatctccctcttcaagctttgatacaatgctctcaagccctttcatcgcttcttcaaatgtcatgttttcattttttttcacgtctgtcatttttcttcccctctcttttctaatacttcacaggtcagcacgccatccttcagcttgatttcaagccggtcctgctcttctatttgactgacacttttaatgagtttatcttctttataagccaagctgtatcctctttccatcacttgaagaggacttagtgcattcagcttgccaagaacggtttgaaattgggaatgcagctgcttcatttggatattcatattttttctcagctgatttgtttgttcctggtatcgtgttctcgcttgtttcagctgttcatgaggatgcaatgcctctaatctgtacgtttcacgctccagctgtctgcttttccgatctaaaagagcggtcagctgtgcttgaaactgctggtacgcgaggtcaaactgctgctctttttgcgcatacaaacgctttggaaaacgaaaggcataggacgattgcagcgtttgtatccgttcttttttctggccgagatgctgctgcattgctcttgtcattctgacttccgctgtttttgtccgttcgattaaatcagtggtatgaggcacagcaatctcagctgctcctgtcggcgtcgcagctctgatatcggcgacaaaatcactaatcgtaaaatccgtctcatgtccgactgccgatataatcggaatattggaagcaaagatggcgcgtgctacaatttcttcattgaatgcccacagttcttctatcgaaccgccgcctctcccgacaattaatacgtcgcaaatctctttttcatttgcctcttcaatgcgcgtaacgatggatctgctcgcattttcaccttgtacgagcgctggaagaacaatgacttttacaaggggatatcttctttttagagttgtaataacgtctctgacagcggcacccgttggagatgtcacaaccccgattgtggctggaaatgcggggatttgttttttgtagcggtcgtcaaataaaccttctccggcaagcttcttttttaattcttcgtacgctaaataaagcgctccaaccccgtcaggctgcatttctttggcatataattgatagtttccgctcggttcatatacggaaattccgcctctgaccagcactttcattccgttttcaggtttaaaaggcagacgctcgctttgtctcgcgaacatcaccgactgcattcttgcgttttcgtcttttaaagtgaaataaatatgccctcgtgtgtgtatctttacattcgacaattcgcctttaatccaaatattttcaaggtgaggatctacatcgaattttcgttttatatactttgtcagcgctgagacggtcacatacgctgcttcacccatgtctaaaaactcctctcctaagcattcctgcaccataactaaagaaaacccgccctggctttaggagcctgaagaagcgggtatcgtgctcatattcaaggcgggtaaacatttcgcctgtgaatatctccaattatctatgataacgtacgtttcgcagatttaacagtattatgcgcaagcatcgtgatggtcatcggacctactccgcccggaaccggcgttatgaaggacgctttttcctttgccccttcaaattcaacgtctccgcaaagctttccgttttccagacggttaacgccgacgtcaatgacaacagcgccctctttgatctggtctgcactgatgaagttggctctgccgactgccaccaccaggatgtccgcttttttcgtatgttcagtaatattttctgttcttgaatgacagtaagtaaccgtcgcgttttcatttaataaaagctggccgacaggtttgccgacaatgttgcttcggccgactacaacaacctctttaccggaaaggtcaatattggttttcttcaaaagctcaacaattccatgaggcgtgcaaggaagaaacgtatcttcgccaagcagcattttccctacgtttaacggatgaaaaccgtctacatctttatcaggggagatacgttcgatcaccgctttttcagaaatatggtctgggagcggaagctgaacgagaatgccatgaaactcagggtcttggttatattgatcaataatggaaagcagttcagcttctgtgaggctgctgtcaaattgatcgagcttgaaattcattcccattgtttctgccgcttttttctttcctcgcacgtaagagtgagaagcaggatcatctccaatcaaaataaccgccagtccgggagtgacgccttgctttttaagctcttctacctcttttgccaattgttcgcgtttttctctagccgtttcttttccgtcgatgattgttgcagtcattttctttcctcctatgattgttcaatatcagatttaatgttagaaagaaccccgtttacaaactttgtcgctttgtcatcaccaaaccgttttgccagctcaatcgcttcgttcatggagacattcaccggaatgtcttcggcatatgccatttcatatgctgccaggcgcaaaatcgcacggtcaacattggcaatccgatcgagcttccaattcaccagatgcttggagatcatttcatccagctggtcttggtgttccaataccccgtgtacaagctgttcaaagaaaggatctgttttttcttcatccagtgcgtgttctatggcttcattcactgcaatatcgctgacatcaatttgaaatagtgcctgcaaagctttttctcttgctgttcttcttttcattttctttctcctttgatcctctttatccgcttgtcgttaagccacaaagagatcataacatatttttttcgtatccgcatattgaaatcaaggtttttttaccctattaccgaatattttcacacaccttaatatgattattcggatttcacgttcatgaagaaactcggctatgtaagccggctttcttcatgctttgaaataaagggtaacgtgtaaaaaaaccaaagggccgccctccccttggtttcgtgttaagccatttacatttcttcgtcgatttggacttcttgggcttttgtgtcaaattgaatgccgacgatgtgaatattgatctcgttaatcgaaagagacgtcatatttaataaggtttgacgaatgttttcctgaacggatgctgcaactttcggaatcgaaacgccaaatgtaacgacacagtatacatcgatcgtaattccgtcatccgccaggtcgactttgacacctttgccatgattcactttgccaaagcgctcaacgacgcctgtcgcaaagtttccgcgcatttcggcaactccatcaacttctgatgctgcaatgccggcaatgacctcaatgacctccggtgcaatctcaaccttacccaaatgcgtatcttcgtgatccattttaagcaagctgttgtctttcattcaattcacctccgtaaaaattatgagcccattacatcatatgtttctaaaaatttcgtattaaactctccgctcacaaatgtttcgtgttcaagcagttttaaatggaaagggattgttgtctcaatgccttcgatgacgaattcgctcaatgcgcgcttcatgcgggcaatcgcttcatctctcgtttttccgtatgtgattacctttgcaatcatgctgtcatagtacggtgggatggaatagccagggtacgcagctgaatcgacacggacaccaagaccgccaggaggcaggtacattttaatttcaccaggtgacggcatgaaatttttgcttgggttttctgcgttgattcggcattcgatggcccagccttcaaattcaacatcttcttgcttgaggctcagttccattcctgaagccactttgatttgttccttgatcaggtcagttcccgtcaccatttctgtgactgggtgctccacctggattctcgtgttcatttccatgaagtaatagcgctgttcattgtagtcatagataaattcaactgttccagcacctgtatagccaaccgctttggcagcctttaccgctgcatctcccatttgctccctgatttctgaatcaagggcaggagatggtgattcttccaaaagcttttgcaggcgtctttggatcgagcagtcgcgttcgcccaaatggatcgtatttccgtagttatcagcaagcacttggatctcaacgtggcgaaaatcttctatgtatttttcgatgtatacacctggattcccaaatgcagttgccgcttcctgctgtgtaatcttaatgccattaatcagttcctcttcagtgcgggcaaccctaattccttttccgcctccgcctgcggtggcttttataattacaggatacccaatttcattagcaagcgaaaccgcttcttccacattttctataattccctgtgaacccggtacgattggcacgccggcctgtttcatcgtttcccgcgcaacgtcttttgttcccatttttgaaatggcgtcagcgctcgggccgacaaacgtgacattcacttcttcacataattcagcgaaatcagcattttcagctaaaaatccgtatcccggatgaatggcgtccgtgccagtcagctttgcaacactcacaatatttgtaacgtttaaatagctgtcttttgatgctttcggtccgatacaaaaagcttcatcggccatttgaacatgaagggcatctttatcagcttctgaataaacagcgacagtctcaattccgagctctctgcaggctctgatgattctgacagcaatttctcctctgttggcgatcaatagctttttaatcatgttcagtctccttactccgcttttacaagaaatagaggttgtccgtattcgaccagctggccgttttctactaatacttcaacgatttcgcctttcacttctgcttcgatttcgttgaaaagcttcatcgcttctacaatgcagacaactgtgttttcatttacttttgaaccggctgttacatacgggccagcttccggtgatgaagaagcataaaatgttcctaccattggtgaagtgattttatgcagattctcatcttgctttggtgcttcttgggcaggtgccgctgcttgctgcgcttgcggctgaactgcctgcggagcctgtgcttgtacaggtgctgccggtgcctgctgcatgacttgaaccgtgcctgcttcgtgttttttcagttttaaggatacaccttcattttcatatacgaattcgtcaattgtagactcgtcaattgctttaatcagctcgtggatttctttgatatttaacattcaatcgcactcctatgtatgaaatttctttttttataggttactactaaaagtacatactatgttcatcttacaggagcggacttttgaattcaactctaatatgacagcaacgcaaaaagcccgcttgtttagcgggcttttttccctcattcttatttagagggttcaaatgtgacagcgacatctttcattgttttgatttcttttgccacaaggtctataatggctgtcgccttcgatttagagtgtttgtctgatttgactgtaatattgattttatctccttcagcattaacaagcgcatcctcgtaaccttgtgttttaatcagcgtttccagctgtttttctgttccttccacttcactgagagccgtcattttatcgtatgcttcgcttttctccttggctgttgcatcatcgcttgacacaatggcattcagctcttctctttctttgcttctggcatcttctaaatcaagacggtacgttgtaaacaaatcatcatcggctgtttccgtaacaacagttcctttttcactggcttcagcggatgtttccttgtctgctgatgaatctttcgttccctttgttccatcttcttttcctttttcagtttctgtaccgcttttttccttcgtgtcttgcttggcaggcgctttttcagttgcgacctctccgctgtcagacgcgcttttttcactttgcatctgcacggcgtttttgctttccggcgacatgatatagtagacgcttaacaccacgacaagactgagcattgttaatagccaaacggtttgttttttaagcatttatgaatcctcctttatttttttaggggcaaccgcaacccggtggcttggaacatccaggacccgtgtcaccgcttcgataatggtttgttttatttgaacgttgtccactccttgagcaacaacgagtacaccgcgtatatcaggttttttcgtttggacgacgacaggtgtttctttatcgccgtttttgatcatgacgatttcttcctccgatgattggtctgtaacgcttctttttccgccttctttgtcagtttcttcagtggttgtatttttgtttgatttgtttttttcgtatactttcagcgacgttgcatctacattcacgacaaccgagacatcgtccacaccaatgattgtttcaagaatttctttcagttgattttcgtattctttttcatagtcatcgatcgagtctttaggtttatcagattttgaggctttaaacacttcggctgttttctctttgctgtctgcggaatgttgtgatgatacggccgttatcgttttggcgttttcagttttctcaggtgaagaaaacagctggctgacaagcataaaggaaactccgagaacaaaaacgaatagaaagtaatgatatttggtcagcttcggcttttcgccgtccttcgtttgtcccggaagaaactgctttttcaatacattccataatccgtttttattcattgccgacactctccccgccttccatatgaaccgtaattttctcacttccgatttcccaaatgtccgcgagctgcgtttgtatctgtttggcttctttttgttcggctgcttcttttgttacgtatgcatgatctgtatcaatgtggaccggcgcgaccgtttggaccgttttttcagaagacggggccatatacacgctgattgttttaatatcctcttctgaatctaccttttctcctgccgtgagtttgatgcggcctactttatattcatcatgactgaatctctcctccgctttcttttttagttggacagccatttcttctagaatatatgcgcgctgggaagcttgtatttctattttttttgaattgatttgattttttatgtcggcagactctgactgcccgttttttgtgaggtattcaaagatgacttcggggtctgtcttgaaaagtttaaaaatcggcgtaagcatgacgacaatcaagagcaggctgactaccatttttgcgtacttttgcatgctggagctcggcagcagcatatcaatcacaattgcaaataggataaacaacacgatggtggtaagccattccgttaaaaaactcatttgcctgcctccttcatttcatcatcatcgtgaggtttccggctgtgattatgacagtaaggcttaaaaaaaacatgagagacacaatggcgagagctgcaaaaatataaatgacgcttttgctgatgacgtcgaggcaggtgatgacgggcccgcctcctagcggctgaagaatcgcggctgccagcttataaataaaagcgagggaaagcactttgattgccggaaatgccgcaatacagatcaaaatagcgacaccgagaatccctaccgtatttttcagcagtaaagaggcgctgattactgtatctgttgcgtctgtaaacattcggccaagcacaggaataaaatttccggttataaatttagccgtcctgagcgtaatgccgtctgtcactgcagctgacgctccctgaacagagatgacgccgagaaagatggtaagaaaaacagccagtgctccgatggcgatatttctgagcaggttagccagctgcgttactttgtattgttcagtcatcgtgctgacaatgctcagaatcgctgataaaaaaatcagcggcatgacgatattctgaatcaagagaccgctcgtgttcatcaggaagaggataacaggatgaaagaaggcagcagatacagctccgcctgaggaagccaaaagcgccaagaggagcggaatgagcgccaggataaagctggtcatcgtctgaatcgcctcagttgcatagttaattgccacatgaaagctattaagcgcaaggataatcagcaccatgtacacaattgagtaagcgaccttactgacggtgctttgctgaaaagcattttgcaaaagctgcagaatgacgcaaaaaatcgtgagcaaaatcaatgtgcccagcagctttccgttggcaagcacttcatgaaacaaataagaaaagagagctttcagccattcttgcggtgagaatgatttatcgccattgataaactccattaagctgcctttttggctttccggcagcagtccgccgtattctgtcataatgtcattccaaaattccccgatcttatctgtttcaagcgaggctgctgtcctttccgctaattgctcggctgtttcagcatggtcttccgtttgttctgcattaccagctgcttgtacaatttctgcacggcctgctatgatcagcacggccaaaagcaaaacccattgaaagcgcttcaatctaccgcctcctttcggttatgacatagaaggtataagtccgagaatcgtttcgataatgacggttaaaataggcacagccattacgagtattaaaattttccccgccaattctattttcgaggcgatggctccttgaccggcatcttttgtgagctgtgccccgaattcagcaatataggcgattccgataatctttaaaatggtttcaacatagaccatgttgacatttgcattaatcgcaattttttctatcattcgaataatgtcgtagatttggtctaccaaataaagaaaaatggcacatccggcaaaaacgacgattaaaaacgcaaaagtcggcttttgttcttttacaattaaagaaaggaaggtggcgatcagccctaaacctacaatttgaacaatgtcaatctgcaagcccccctatccttggaataaaaacacagcttttatctttttaaataggtcatctacaatcgtggcgaccataaataaaatatagataaaacctaacagcgtcacccactgagcatattctttcttgcccatctgatccaatatcgtgtgtaaaaaagcgaccacgattcccactccggcgatttgaaatatgacattcacgtctactcccattttatttttgctcccctcacgtttacatcaatagaagaatgagtaacaagcccgctaaaaagcccaaactttttatcatcttttcgtttttcgcttgcgcctgctcagcatccgcttctgaggcttccaaatgtgtcagcgccagcttgatgtgcttttgctgagagattcgatcatgaatcccaagcgtctcgccaaactgcttcagcacttcgtattcgctttttttcaaagacagggtgtcccataccttctttaagctttgctcccacgccgttttcgcggaatcacttcccttgtccagctgatcactgaatgcggaaaaaagagttgaaacaggctgtgcgagctgtttggcaatctgctgtgaagcagtatgaagcggtgtatggccgtacatgatttcagcctcgagggattgaagcgccgcacgcagctggcggatttgccgcggccgttctgtataaatcttcgccatctcaaaacctgtccatgttgtcgctaccacaatgaatacagcgcccagcagcttcagcatgttttcacgcccgtcgtcctagacagcacatttccgtctttgtcataaatttggctcactgtgcccggcccttttgctcttgataattccaaatagcggtcaaaggctctttcttcccacaaacgcttcaatgaaggccgcttcatcaggtcggatatactccagccatgcgccgatacgattactgaaacaccggcatgcagcgcctccagaagtgcatctgtatcttccatacgcccgatttcatcgacaatcatcacctcagggctcatggatcgaatcatcatcatcagcccttcagcttttggacaggcgtctaacacgtcaattctctgaccaaattgatgctgcggaataccgcgaagacatccggcaatctctgaccgttcatcgacgatccctgtctttacgggcagcatgttttttttgccggtgcttgagagcctcgcaaggtcccggagaagtgttgttttgccggtttggggcggtccgataatcagcgtattcagccagctgttttgatataagtatggaagcagcggctccgcaatccccagcttttgccgggcaattcgtatattaaaagatgcgatgtcacggaggcctttcacacctccgttttccgtaatgactctgcccgccagtccgactctgtggccgcctctgatcgtgacataccctttcttcagctcttcttcaagtgtatacatactatagttgctgagccggctcaggatcagatgggcatcctcggccgtgcccgcataggacaaataaacaggttgtcctcttcgaatcaattcaacagggcggttgatccgaattctgacttcttcgatttccagccattgttgttccggtatttcagaaagggcgtttttcatggattcagggagaacctcagcgatttcattcaacagagcctcctcctttctaccgattggcttctttaaaatgtatgatgtgaggcagactttatgacaagcctctctttatttatgaacacccgccaaaatcaagacaacacccgtaaaaatcagaatcagctttgcatacgaaagctgcccggcaatttggtagattccgacagtcattgtaatgataaaaatcaacggaccgacaatagcgagaatgctgttaaccacaaccgccttccggacatcgttggtcacaagcatgacaattgctgccgtcagctcaatcatagaggataaaactcgtaatcccgccattgttaaaacagtagaattgatatttccaagtaaaaatttcatagcactctcccaacctcccatttttttatatgatatgctctagcttgctgaagtagtcttgtcattttcgtataaaagaaagattctgtttttgggcacaaaaaaagcctgctcccatttgggaacagacttctttttttctttctatgctcttgaaacgtaagaaccgtctgatgtattgacaacaagtgtgtcgccttcattcacaaagaacggcacgtttacaacaagcccggtttcagttttcgcaggttttgtaccgcctgacgctgtatcacctttaataccaggttcagtttcaacaactttcagctcaactgtgtttggaagttcgataccaagtgtttcatcctggtacatcatgatatgcacagacatgttttctagcaggtattttaattcttcttcgatttgagttgcgctcagttcaagctgctcataagaagaagtatccataaatacgtgctgatctccgtttgcatatagatattgcattgttttggtttcgatttgcgctttcgctactttttcaccagcgcggaatgttttttcctgaatcgcgccagtgcgaaggttgcggagtttagagcggacaaatgccgcaccttttccaggttttacgtgctggaagtcaacgacgcgccaaatgccgccatctacttcaattgttaatcctgtacggaaatcgttaactgaaatcatgtttaatgtcctcctatattccaatcacaaaataataagttcttttggggaatgggtgattgtccggttgccgttttctgtaatcacgatgtcatcttcaatgcggacaccgcctgtttctggtatgtaaatgcccggctccactgtgaccaccatacccggttcaaggatagctgaagatctgacggataatcccggcgattcatgaacttccatgccgagcccgtgcccggttgaatggccgaaatagtcaccgtagccttttgcagcaatatgatcccttgtgagggcgtcagcctcttttcctgtcattcccggcttaatatgtgcgacgccaagcgcctgagcatcaaatacaacctgatagatctccttcaattgatcactgggctgacctacagcgaccgtccgggtaatatcagaacaatatcctttataataagcgccaaaatcaagcgtaacaaggtctccgctttcaatcagtttgtcactggccacaccgtgcggaaggcttgaacgaaggcctgaggcgacaatcatatcaaaagaagagctgtctgctccctggcttctcatataaaactccagctcattggcaacagcgatttcagaaatgccgggtttcataaacgtcaagatatgtctgaaggcatcatctgcaatcttcgcagcttcctctaatatcttaatctcttcactagacttaatcaagcgcaacttttccacggattcagccacaggcactaattcggcatcactgataacggcgctgtatgaagcgtaagtgccatatgtcatgctgttctgttcaaagccgagacgcttgatgccaaacgattcaacagtgtcggcagtggtctgaatcaagctgccgccatgttcaatgatctcaaaaccctttacctgaaccttcgcctgctcagtataacgaaaatccgtaataaacgctgctttgtcacccgatataacagccaaacccgccgaacctgtaaaccctgtcatatagcgtacattagtgttgcttgtaatcagcatgccgtcaattcccagctgtccaaacaggtttcttaatttctctagcttcatcttgattctcccccttgctggcttaataagtagcgaacagcaagcttgtagccttcagctccaagaccgacaatctgccctttcgcaacaggagcgataaccgactgatgcctgaattcttccctggcgtataagtttgataaatgcacctctaccacaggaagactgatgcttgaaacagcatccctgatcgcatagctgtaatgactcagggcgccggggttcagaacaatcccgctgtattgctcctcagcctcatgtatcgcatctatcaaatcaccttcgtgattagactggaagaaagtgagctggatatgtaaggcttcagcaaactgaaaaagatctgtttcaatatcggtcagtgtctggcggccgaatacttcaggctcacgactcccaagccggttaacattcggtccgttcaaaatcaaaaaatgaggcacacaatctctccttttcgcgagggtttctcatgtaaaaaatgttcacttctcgtgaacattttatcatactggaaaaggattatacactattctctatgcattcccagcgcacgtgcaagcttttccgaattcagctcattgtattcaaatgaaatagaatacccgacaaacagcccgtaaagcaaataaatgcaaatggtcgtaataattgtatctgatgtcagttcggtcaccgtgcgcacatctggaaaaatcggattaaaaacaaaaaacacgagcagccaaagcaccaagccgtataaaatacccggccacattgtttttaaacgtttcaatagaagaaaataaagaaatgctgcgccaattgaaattactccaatcaaaatgatgctgattaccgttcccagcccatgttttttccactctccgagtacaaacggctgcaatatcatattcgggctgatttcggaaaaatgaaacaaatatgcgatataagcaacgaaactccaaagtacgcctccgcaaaaacctgttgccgccaccctgccggccattgaaacaggcggcttttgcttctcattcaattcttcattttgttctgtatctttttcgcttgtcatcatggcacctccagttaaagtgtgcccaaaaaatgaaatgtcaataaaaaagctcacactttttggcagctgcgagtaaaatttgaaaataacgggtataatgcatgtagaaaaagcaaggctatggcaattttttcagcctgtcaatctagaggtttagcgctgtttcctgtacaatagagtgaaaggaaatggttagcaatcctaaagaaataggcaggttgataatatgtcaaaacataaagttccgcccgcttacggcgggcaggctgttgtggaaggcgttatgtttggcggaaagcatcattacgttacagccatcagaagaacggatggaagcattgacttttttaagcttccacgcaaacacaacccgaaactgaacatcgtgaaaaagataccgtttttacgggggatcgcggccattatcgaagcgagtgcaaacggcacaaagcatttgaatttttcaagcgaacgttacgggctcgatccatctgaagacgagacacttgagcaggaagaaaaaaaatcctctgggctgtctatgtatctcagcctcgcagttataggcgtcctatcatttttgttcagtaaattcgtatttacattggttccagttttcttagcggaactgacaaggccgattttttccttgaacacagcgcaaatcgcgattgaaagcctgtttaagttgattttgctgctcggttacatctattttttgtccatgacaccgcttattaaaagagtgtttcaatatcatggagccgaacataaagtcataaactgttatgaacagaatttgccaattactgtggagaatgtccaaaaccaatctcggcttcattaccgctgcggatcaagctttattttatttacgattattgtcggcatgtttgtttatttactcgttccgacagatccgctttggctgcgtgttatagatcgtgtcgcactgataccggtcgtgcttggtatatcctttgaagttctgcagctgacaaacaaagtgcgtgacattcccggtctgaaattacttgggtacccgggactttggcttcagctgttaaccacaaaggaacctaaggatgaacaggttgaagttgccatcgaaagctttaacgaacttctcagactcgaagcattgtctgagcaaaatcagaagccttctcacaacgtcatctaaaatccgttgccctgctattactttcggaggtggacagttatgaatcatcgtgtacaacctattattgctgtattaattgcgctgggagcgttcggtttcctctatgtgctggtaaccaatcccggagaaatggcaaaaatggcggtaaccgtcatcgtggcaggtatcattatttattttattgtgaaatatgtaatgaatcgaaatgcgggcagcgaaggagcagccttcaaaaaagcggcgaaacaatcacggcgccggatgaaagaacaaaaagcaaaacaccgcgccggacataagggacgtgtcagccacctgcgaagcgttccgagcgccagcaagcctaagccgatgattctcaagaaaaaaagccagactcagctgactgttatagaagggaaaaaaaataaaaagaaaaacagagcgcttttttaataggtccactgctttaaaaacagctctgtccgtcttttacctagctcaatcagggctagttttttttgttgtgttaaatgaaaatcagtggccattacgtcatcaacagggagaaaaatgatattttgttcatagcgtgacgcaatgtgccttgcgtcatgagcatccttcatcgtttcaaacagggcgccgaacagttcaaaagcgttgcggatattttttttcggacgctctctttcacgcggcgcaagcgtgacaccgatcacagggcgctttctttcctttgaaaacagccagattggaaaattgcttaacacgcctccgtcgacaaccgtggcggtgcctgtgtccgtttttaattttatcggttcaaagaaatacggaatgctgcagctcattctgaccgctctggcaaccgggaacatatctggatttaacccgtaacgggccaaatcgtccggcaaaacaatcatggtgccgtttgtcagatcagaagcaataaggcgcagagaccctttctgcaaatcgccgaaaacccttatgcctttcgctcttaacagatcagcaatccatttttctatcgtatcgcctttgtataagccaagacgccagtagatggacacccactggagcatctttaaggggagaaatgagtacctctgatccagcaatttctctccgtccacttcttcaattaaagcgtggatttccttactggtgtaacctgacgcaatgaaagcggcaataatggcgccggcgcttgtacccgcaactcttttaaagcggaagcctttttcctcaagcacttcataagcgcctgcgagcgcaatgccttttactcctccgccggaaaacacaccgtcaatatacatctcattccctccccctccatccgatcgtttattaccattttaagaaaacacgcgaagaaatagaccaacgaatgacgggtggcgtcagcgtatcaaaaaagacggcctccttcgagaccgcctttttactgattatgatgttctgttttcttttggattgatttcagatcttttttacgggcatcatcttcttcaaaatattgaacaagatccccgatgcgatcaatactgttccagcttaaatgatgttcgattccttcgacatcgttatatattttctcttcatcaacaccaatgattcttaaaaactgctcaagcaattcatgtctgtataccagccgtttgcctatttttttccctttagacgttaacacgagaccgcgatatttttcataaattaaatattcgtctttatctagtttttgaaccatttttgttacagaggagggatggactgccaatgcttccgcgatatcggaaactcgtgcatatcctttttcttcaatcagcatataaatctgttcaatataatcttccatacttggtgttgtcatcgaaaccctcccaaaaagcaccttaactttataaaccattacaagtttacactaatgaacttgaaaaaacaaggatgctccgcgggtcaaaagccctgtttaccgcttataattccattcatctgaagcgtactttgtttcagccaagtgatgaacaaaatcaagctcttcctgagaaagttcatatggctccaaatgaatgttaagacctgtttcaaatccttctttaaaggctttacgagcctcatccatcgtcacccgcttttcgatgagttcattaatggcaaccgctttatttttgaaattgcgctgcatccgctctcttactctttcacttggatataagaacagatcgaacagcttgtcctcatctaaatcaagaagaatggagccatgctgaagaatcacacctttttgtctcgtttgcgcgcttcccgccaccttgcgcccctcaaccactagttcataccacgaaggcgcgtcaaaacaaacagatgaccgcggattttttaagctttctttttctttttcagttctcgggatggcaaagtaagcgtccagaccgagatttctaaagccttgaagtatgccttctgaaataacccggtaagcctcagtaacagtcgccggcatctcggggtgctcttccgaaacaattacgctgtatgtcagttcctgatcgtgcagcacacctctcccgccggtcgggcgtctgacgaatccgagattatatttatgtactgcttcaaaattgatttcctttttaatattttgaaaataccctacagaaagtgtcgccggattccagccgtaaaaacggataaccggggggattttcttttcgctgtgccaatataaaagcgcttcatcaagcgccatattgaatgcaggacttgcattgcctgagtctataaaccgccaagtttctttttgcattttaagaccttccttaccgttttaatagaatcagtttatcaaactgtcgggaaaatgaaaaatattttagttccattatagatgacaatcacgctgtgctttactataatagtatttgtcgaaaacggctctatgaccttgttttatgaagcagggttttgattttatatgctaaaggagtagaatcacattgtctaatatgatcgttttgattatttttgctgcatttatcatctatatgattgcttcatatgtctatcagcagcgaattatgaaaacacttaccgaagaagaattccgcgcgggttaccgcaaagcgcagcttattgatgttcgtgagccaaatgagtttgagggcggacatattttaggcgcccgcaacatcccgctttcccagctgaaacagagaaaaaatgagatccgtacggacaagcctgtttacctgtactgccaaaacagtgtccgcagcggacgcgcggcacaaaccctgcgcaaaaacggctgcactgagatttacaacctaaaaggcggctttaaaaaatggggcggaaagattaaagcgaagaaataaagcaaacagctgtctggtagacagctgtttttatttatctttcttccgcctcgtatctgagcactgggtgtctcgccgcttttgtttcatccattctttttacaatcgttgtatgcggggcctcctgaacaagctccggattctcctccgcttcttttgcgatttgaatcatagcatcaataaacgcgtccagtgtttcctttgattcggtctctgtcggctcgatcatgatgcattcttcaacattaagcgggaaataaatcgtcggcggatgatagccgaaatcaaggagccgttttgcaatatcaagcgtacgcactcccagctttttctgccgcttccctgataatacaaattcatgcttgcaatggcggtcaaacggaagatcgtaataaggcgcgagttttctcatcatataattggcgtttaacactgcgttctcagtaacagcctttaatccgtcaggccccatggagcgaatatacgtatacgctctcacattaatgccaaagttgccgtaatacggcttcacacggccgatcgcatgagggcggtcataatcaaacgtaaagcgcccttcttttttgactaaaactggctttggcaaataaggaatcagatcttgttttacgccgacagggcctgagccggggcctccgccgccatgagggcctgtgaatgttttatgcaggttgaggtgcaccacgtcaaatcccatatcaccaggtctcgccttgcttaaaacggcatttaaattagcgccgtcataatacagtttcccccccgcttggtgtacaatttccgccatctctgtaatctgctcctcaaacaagccgagcgtgttcggattcgtcagcataagagctgcagtttcttcattcactgctctttttaaatcctctaaatcaacaagccctttttcattcgatttcaccgtaacggtttcaaagcctgctactgttgctgatgcaggattcgtcccatgcgcggaatcagggacaatgaccttcgtccgcttgaaatccccgcgagcttcatgataggcacggatcatcatcagccccgtccattcgccgtgcgctccggcagcaggctgaagcgtaacctcatccattcccgttatttcttcaaggtgtttgcttaaatcatataaaagctctaatgcgccttgcaccgtgtcttcatcctgaagaggatgaatcgcagcaaaaccaggaatacgtgcgattttttcattgattttcggattatatttcatcgtgcaagaaccgagaggataaaaaccggaatccaccccgtgattgcgtttggacagcgctgtataatggcgcatgatgtccagctctgaaacctccggcagcgctgcgtcttcgtcacgaatataggtgtctgacaagaggtcccccaattcgatttccggtacatcgagctccggcagactatagccgattcggccttctcttgaaagttcaaaaataagtgcctggtcctgattactcatggcgatcccccaattcctgaatgagtgcgtcaatttcttcttttgttctcagctctgttacagcaatcagcatatggcagtccagctctggatacgtcaacccaagatcatatccgccaatcatgccttttgccagcaaacgcttgttcacagctctcaccggctcatccagtttgatgacaaattcattaaacatcggcccgtcaaacataacagtaaggcctgctttttttgcttcttgctttgcatagttggcttttaagagattttggcgggctatatcttttacgccgttttttccgagagcagtcatggccactgatgctgccagcgcatttaaagcttggttcgagcatatatttgatgttgctttatcccggcggatatgctgctccctggcttgcagggtaagcacaaagcctctttttccgttttcgtcttccgtttgtccgacgagacggcccggcacctttctcattaattttttagtaacggcaaaaaagccgcaatgcgggccgccgtatgctgaaggaatgccgaaaggctgcgcatcaccgacgacgatatcagactgaaacttgcccggcggagtgagaagacctagcgccagcgggttggctgaaacaataaacatggatttcccttgatgagcgataggctcaatatcctttagcggctcgatcctgccgaaaaaattcgggtactgaacgatcactgcggctgtgttctcgcaaacggtttggcgcaatgcatcaagatccgtaacgccatccgcagcgggtacttcaacaacatcaatatactgaccttttgcgtaagttttcagcacctctcgcgattcaggatgcacggtttttgacacaacaatttttttctttttcgtgtggcctgaagcaagcattgctgcttctgccaaggctgttccgccgtcatacatcgaggagttggcgatatccatgcctgtcagttcacagatcatcgtttggaattcaaaaatagcctggagctctccttgtgaaatctctggctgataaggcgtatatgcggtataaaactcagagcgcgaaatgacatgatccacaatgacaggctgatagtggtcatatacacccgctcctaagaaagaagcgtattgtacggtatcacgatttttagaggccagctttgtcagttctcttgttaattctgtctctgatttcgcttttttgatttgatgctcttttttatatttgacgttttccggtatatcagcaaataaatcatcgatgctgcttacgccgatagtagcaagcatctcctgtttatccttttctgttgcgggcaaataacggtgcttcatgtgttgtctcctctctccaagaaaaaatattagcgtttataaaatggtgttttgacaacctttgctttcactaattttttgcgtatctctacatctacaacagtcccgatctcactcgtttccgaatcaattaaggcaaggccgacgttttttcctaatgtcggtgactgcgtgccggttgtcacctttccgacagacttgccattttggaaaacctcatatccgtgccgcggtatccctttttcaatcatttcgagaccgacaagtttgcgcttcgctccgttttctttttgttcactcaatactgacttaccgaaaaagtcagactcctttttgtgctttacagcaaagcctatacctgcttcaatcggtgtaatatcccgggtcagctcctgaccgtagagcgggagcttcgcttcaaaccggagtgtatcacgtgcaccgagaccgcatggaatcaatccgtatgcatcccctgcatcgatgatttttttccaaatatgcatagcatcatcactgcggcagtaaatttcatacccgtcttctcccgtatagccagtgcgtgaaataagtgctttgcggccgctgatatcggcttcatcaataaacgcaaacggctttaatgcagacacatccgcatctgtcagattttttaagatcgcttctgctttcggtccctgtacagccaagagcgcgatttgatctgactgattgtcaatctgcacatcacctgctgcatgttctttcatccaagccaagtctttatctatattagaagcattaatgacaagcagatagcggttctctcctttttgatagataagcaaatcatcgacggttccgccatccgggtaacacatcgctgtatattgagcacggcctggcgttaacgcggaaacatcatttgtcatcaatctttgcaaaaaagacagactgtcgttccctgacacttcgacttctcccatatgagatacatcaaacaaaccggctgcagttcggacagcctcgtgttctttttttatagaagaaaattgaacaggaagctcccagcctccgaaatcaatcgtttttcctccatattccttatacaggtcaaataacggcgttcttttcagcatctaattcctcccctttatcaacggcgcagctaaaaaacatacaaaaaaggacagagaaacacctcatgtaaaatgaaggttctctgtcctggcacctgaaagtttactttgcatacgcaaagacgtcccctttggtggtttgcgcatccgcacaaacactctccagagttgcgtcgagcaagagttcttttgcctgagagattcactccgcagtttgctccttcggcgcctgtatcccgaggttttcggtcaggtctctccccttgctgtcattcgctcatattttcatgctgttatggacatactatagcaatatcttacatcaaatacatactcatatcctaccatcatcactatatgctgggcaacagcaatttgggcagatttttcttatattattcatcttaagaatcgaagaataagaaaggcggtttcaaagcaatgaatacagaaatgatctacgatgcaaaatggcctgaagaatttgctgaaagactgaaaaacgatggcccttgggcaaactgggaactgtacaagctctctgcagaaatccagaaaacattagcaattccagagtttgaaggcttacgggctcctttatatctgccttcctttacgccgctcccccaccagcttgaagtggcgcaaaaagtggttgaaaaaatgaacgggaaagcgattttagcagatgaggttggtctcggaaaaacggttgaagctggactgattctaaaagaatatatgattcgcgggttagcaaaaaaaattttgatccttgtgcccgcttcccttgtgtcacagtgggtcaaagagcttcaggaaaaatttttgattccggctgttgaacaaaagaaaagctatgtgtgggagcaatgcgatattgtcgtctcatcaatagacaccgcgaagcgctcgccccatcgagaaatcgttctgtctatcccatatgatcttgtcattattgatgaggcacacaaactgaaaaatagcaaaacgaagaactatgaatttgtccggaatctcgtaaaaaaatattgcctgcttcttaccgcgacgccaatccagaaccgtatcgaagagattttcaatttggtgtccttattaaaacccggccatttaggcagtcagaatcactttcaggaggagttcgccaagaagaaatccagtttagaagcgcatgaacatttaaaagatcttgtgaataaagtcatgatccgtaacaggcggcatgatacagggctgaattggaaacagcgccatgttgaaacagtgccgattcaattttctccatcagagcaggcgctttatgatgaaatttctcgtttgaaggacagtatcaataaaccagccagcatgttctcgattatgaccttgcaaagagaatgctgttcgagcagagaagcggtatatatgacgctgaaaaagatgcttgatcaaaaagagaaacaagcacctgccattgatgaggatacgatttcagttttgatagatcgcatcaatcaagtgacacaaaactctaaagcgcttcaagttgttgacttgatcaaaaagatcgacgataaggtcatcatttttacagaataccgcgcaacccagatttatctgcagtggtttcttcagcaaaacggcatcagttctgtgccgtttagaggcggatttaaacgtggaaaaaaagactggatgaaggatcttttccgcggaaaaatccaagtccttattgcaactgaagcaggcggtgagggaattaacctgcaattttgcaatcacatgatcaactatgacctgccatggaacccgatgcggcttgagcaaagaatcggaagaattcacagactcgggcaggagcgtgacgtgcatatttataacatggcgacaaaacatacggtggaagagcatattctaaagcttttatatgaaaaaattcatttgtttgaaaaagtggtcggtgaacttgatgatattttaacgaaaattcaagtgaacaattttgaagagcaccttcatgacattttgtatcactcagcaacagaagaagaaatgaaaataaaaatggataacttaacctcatttttgtcttataaaaaacagctgcctgctgaaaaaagaggatcttagcctgtaaggaggttttattagtgagacagcaagaggttcacgattttctgctgcgtttttttcaagcaaacagctgccaaatcgtcgatcaaggcttaggctatatgacagtgcagcttacagttgaaatggacaaacaaatcatgaaccgccctttctactggcattggcgcgagaagacaggcggtgatccgaatccaatgaaaatcacttttattacagataaagaaaatgcgccaaaagacctagatggtgaatttatatattttggggccccgcgtctttttcaaatattcaaagctgttaaacaaaatgggagatttaccagaatgtatgagaaaattgaatcagccggagctaaagtcccacttcagccttggcttggtataaatgtcacgatttcataccagtccgacatgaaaaaggataagttattgtcactaggtcttcacctagtctctggaacgataattgaagattttcaaagcaagctgacccagttttcactgacgtctcaaatatgtgactattgcttcaccatttcacctatgatcaaaccagaaagcggacttaagcgtatggaaaactatatttccaaatccgctatgcaggagccgtccgactgggcggaacaggcggttaacaggtggaagaatgatatgacattgcttgataagttttacgagcatatagaagaaaaaccagaagaataccatctagaaaaacaggcgctgaaaaccttgtatcaaccaaagatatcagttgaaattgaaaatggcggattgttttatctgcaaaataatatttcaagctaacttttttaccattcgacatcattctcgttttttttgagaaaatacgattataataaaggtatattggaaaaaaattctggtgatttaatggcaaatgacttccagagactaatgaagcatacaataagtcatggccggactggctgaaatacataaacaagtattttaggaggagaaactgcatgaagaatgcaaaacaagagcactttgaattggatcaagaatgggttgaattaatggtggaagccaaagaggcaaatatcagcccggaagaaatacgaaaatatttacttttaaacaaaaagtctgctcatcctggtccggcagccagaagtcataccgtaaatcctttctgaatgtgctataatatcacaaggaaggtgatgacattgattggccagcgtattaaacaataccgtaaagaaaaaggctactcactatcagaactagctgaaaaagctggggtagcgaagtcttatttaagctcaatagaacgaaatctacaaacgaacccctccattcaatttctcgaaaaagtctccgctgttctggacgtctcggttcatactttgctcgatgagaaacatgaaaccgaatacgatggtcaattagatagtgaatgggagaaattggttcgcgatgcgatgacatccggggtatcgaaaaaacaatttcgtgaatttttagattatcaaaaatggagaaaatcccaaaaagaggagtagtgcctgagcagaggcactaactcctcttttgtcaataaccatcgagacggcccagtatatgaatactgggccgtctcttttttttgctgttattaatttttatcctcgctatgcgctttttcattttctttcacgtaaccatctttatcagtatggtcctttttgattgtcaagccgttccactgtgtagcttcgaatgagaattgaagcttaatggagttgccttgatatttattttgaaccataagccctttttcatcttttgttttatcatccttgaattggatttccatttgaacctgatcgaagtcagttggtgtttttggaacaccatcatattcaggagcggttttaccatcaattgttgctacattgactttaccgcttgcatttaagaatttagggtcaatttgttttttgattttttcagcagccgctgcatcatttttagcagacatcaaatacaagtctttaaggttcgcatcatctaaaataatgtttttcgggtagccattgccgccctcttttccaactgtcaacaatgtcacttcaaactggctgaggaaatcttctggagatgtattgctgccgccgtttgctttaaaatctccataattaagcgccattagaacttctttgatcgcaagtgatccgttattttcaaattggaaatcctttgtcaacttatctcccggctttagatttgataagttcacactcgctgaattctctttagcagataaatcaagcgtacctgatgcaaaagtagcatcctttgatttaatgtcgttaaatgctgcccatgttcctcctccaactaaagctaatcctagtgctgcagaagcaactcctaaactcaatttctttttcatacccatggtaagctccccttttattgaatgattttatatcgaaacctgttgccaggtttacaactgaagttaagtagacatggtgctgtcctttgtatctgtttccaaggcttttgtctttctttcaatttctctaatggcgctgctgatcgtcacaaaagcgtaaactaacagcatcacgccgggaacaatcaataatacagccgttccaatcggctggctggcaaaatgaagcatatagccggcatatggaagctgaaaacctgtgtattgcgcgcgaacattttcgtccgatacaggcgctgaatcagctgctgcattattatcaccttttgttttaaataacaaatggtctccttgctttgttatgtcaacaattctgtgggtgaccgccgtatttgcatcctgcataaatgtaataacgtcacctttttggagctctttcacatcagtgatttctttgaccaatattaaggaacctgtattgaactccggctccatcgaacctgacagaactgatttcagcgtatacccaaacactgccggctctcccccggatgaacgtgttgaaatcacgacaagtgtcagcacaataataagagtaaagatgatcacgtataaaatattactgatcagcttcattgcttttttcatcctcttccccgctttccttctggtctgattgagtttctttttctttggttacagcttcttgagatgtttcttctttcattgttttttccggtatatctttttgtgttgtttcattctcctttttgacgtccgactttgtttcttttttagggactgtcggtttttcatcgcattttgcaagcctcataggctccgaccactcaaatgtactgccgtttgccgggtagcctgccggtttatatactttaaatgcataaatgccgggtttcatttttttcttggtctcaattttataaagtgaatcgccgatttgattggagacaaatcctttttcgatcacgttcccatcctttaacggtttgcgggcattttcaagcttatgaagctcccacttccactttgatttcttaagtttctcacctgtattttcgagcacagcaaataaggcgaaaggtgagcatacagtgcctttcgtatccgtttgatctgatatgtgcaaatcactttgatcccagcgtttatcataatggcagtttttatctgtatgctgaaagtctttacacgtttgaagtgagacatcaaatgtttcaatatcatgaaaagcagcgcttgtatcatcggaaaattgtaagcatattgcggcagtcagactgaaaatgactgaaagctgaaagataagcagaactttcagtttcgtcttcgccttttgctgattgtgaaacaatcgaaacatatcttacctcctgtaaaacactgtaacttgatatgacaatcgttctctttaaagaacttcacaaatagagtataatcaacgatttatagatttaaaaacaccgaaatcgctcattttgttcgtttaaaagaatgttttcatcatattacaaagtcttgctcagtattgctcattttttcaattttttagaaatttttgggattgttatgtgagaatttaaatgcatatcccattattatttggtaataataaacaaagaaagggtgacagcatgatgatcaaacaatgtgtgatttgtctatctcttctcgtctttggcaccacagccgctcacgcagaagaaacaccgcttgtaaccgcccgccacatgtccaaatgggaagagattgctgtaaaagaagcaaaaaaaaggtacccgctcgcacaggtactgttcaaacaaaaagtatgggaccgtaaaagaaaagatgaagcagtgaagcaataccatttaactctgagggaagggtcaaaagaattcggcgtttttgtgacgatttcatttgatccttatagccaaaaggtcaataaaattgccatattagaagaatatcaataaggtcctccattttttgaaggaccttattcgtttatttgcggttattttttccgtttcagccaaagtcggaagccatagggtaaaataccgaaccactgctgggaaacaggcgtttttgtttctttccgcacctcttttcgttcttttcgctcatctctcggagtatctatatatttgacaaattgctgcgtcatatatttaacataatcattcgttttcacgtgatcacctcatcattcaattattatgagtgttgtctcacatgactttttttataccctttacactgttttattctgtccatctcagcagttttttctgtttttggtcaaacacgatctgtgcagttctttctgttcccgaatccgttgacactcttaagttgatttctttttgttcttttatcgatgtatcatgaatgtaataagaaacccgtccatatagaaattgctgcgtaccctcctggcctttccgttcctctagaacatgccgaatcgaaagaagcaccccattttgaagcaaattctctcctatgtataactcttttgtttccttctcaaacatgcagcgtgaaatatattgagcagcaacaaagttcacgattaacagcacaagcgctgacacaaaaagaacagctggataaataaaccctcttgtacgatacattcacccccctcctaaatacgaatagactggaaaagcagtttgatacactttttggtcttcactctcaattttcagcaaaacaacaccattttcaatatcagctttcatggcagtaatatgatctaaaatcggaacatgccctttgccatccactctttttcttatcattgaatgataaatgtcaaaacggatgtcttgtccggaaagattggtgcagattaacacgctcccatgctcggctgtcttaactgcctgtgattccttgcattcattcatcatctgttctatcgaaatcatccattcctgctgtgtgaaaccgtcatgttcctgctgtcgagacaaaaacagatggataatcgcagctaacgatcctgatatgagcaaaaagactgagagcgaaaataatacgttaagaagcgtgtagccattctgtctgcaaaatgctgaggcaaaatgatttttctttataagctgcggctttgatacatacgttttgatattcgccctcctcctcccacttcattgcatagatatgattgttctttgtaatcgtttttgacgcggctccttcaccactcatgacatatttgctaatgctctcattcatcatctgatagccaatttctcgtgattccgccattttttcatcagccatcagcttgtcccacaaggggacgactgtcagcagcacaaacagccacaggcttagcgcagacattgtttctattgtagaaaaacctttattttctctccacattgactctcccgctccctagataaactgttatgtcataaacggcatggccttttactcgtatttttccgcctgcattcgggtgccctttctcattaaattccaaacggtcttttaatgtcagcagttctatagaaagtcccgttgcatacggacgttcaataaccgtatcaccaatgactaattgatattcttttttatgaaagagaatttttgttctttgttgacgggaaatagcagtctgctgtgtgagcataatatcatttttcagctgacttgctgcctgtcggacagctgtattgtcataagcaggaggaagtgtagtgaagacggccaccaggaggatagaggcaaggcttaacacaagcaaactttctaaaagggtaaaccccttctcctcgtttaatttaatgttcaaccttaacttctccgccggtgatgataatgcgcttaccatttggacagacagcatcctttttcacatagccctctgactgtaaatcggcaaggctcggagtttgtccttcatgatcaagctcaaatgcagtcatttgtgccttaaccatgttttgtaagccttcacagccctttttttgaatggtttgattatgtttcgtgacgttcggtatcgtaattaaaagcaaaatcgaaataataaagagcacgattaacatttcaacaagtgtaaatcctttctcattcatcagcctcttcctttcacatttgattcatcatctgatacataggcacaagcatagataaatacacaagtaagatcatcgctgcaacaaatccataaatcattggctgaaggatgcctgtccatttttgcgctttgtgttccagccgctgtaatatgaattggctgtatgtgaaaagctcccgatccaatcggccgctcagctggccgtgagatatgacttttgataaatcagtttcataaaaaaggcttccacaaatagcggattcaattgactcaccggcttttagccgttcaatcaattgttcagcctcgcagcggtagaaagggagaaacgtttgatgtttaaatgcattaaggctgtcataaattgagaggcctgattttaaaaggctgcttagctgcaaagaaaaaaagtagctgttaaacagctttacaagctttccaaccaaaggaatcctgatacaaatcagcatttgccgggcaggtgattttttcttaaacacaagccaataataaatcccgatacctgctgtaaaaagaacaagcaaaatgatcacaagatcaatatgctgaaaaaaagcaaaaagcatatcggttgaacgtgaggtttccatattcatcgattgatagataccggaaaactgaggaatgatgatggactgtaacatataaaacatgacagcgaccgtaaagatgaggaaaagcggatagcgcagcactcttttcagctggtctgcctgtgcaatttttcgttccagcagctctccgctctggatcattgaagcaggcagttcaccatgtgtttcagcaaaataacaaatacctacggcttccttatgaaatgacaaactctttagtacttgataaaacggagccccttccctcaaacaagtgaccgaatcagtcaagtcagccgcctgcctcttattcatctgaagttccatcaggcgtaatccatccagaagtgtatatccgcccgcagtcatttcaccgagcctctttaataacctggcttgatcctttaacaaccagacttttctaatctttttcatgataaacccaccggtcatagttgtttgtcgttaaatagccgagcgcaattccttttctgataatttgacgaagcgtttgatattggtaatttgcatgatttccttttgcctcctggatacattgctgaagatttttcccgtatagaagctcataaacgctagctctcctagtatttcgtgactgtcggcaatacactgatgaacatccgttttcacaaaacgggcaagccaaatcaaccaagcgctgagccgctattgcaatgacagtctgttcgatttcattcatattgataccgaattcaagcagtctgtaaattgcgccctttgcgtctctcgtatgaaggctcgttagtaccagatgtcccgtcatcgctgcccgcaccgcaatttcagctgtttccgcgtctctgatctcacctaaaataatcatatcggggtcatggcgcaaaattgctttcagacctgcggaataagttacaccggctttttcattcacctgaacctgaagaacatcttcgtcccttgtttcaacagggtcctctaatgtgacaatatttcgattaaagtgtttttttgcatattgaacgagagagtataatgtggtagtcttccctgaaccagtcggcccggtaaaaatgagcatgccatgggaatgttttaaaaacgagagtaatgtggctcctgtcttcggaaatagcgacaatttatcaatcgaagggatattgtattggggcatcactctgatcacgaggctttcttcattaattgtgggcagcgttgacattcttaaatgaacatttccctctttcaactttaacgtaagcgaaccgttttgcggctttcgcctttcacctatatccattgctgaaagaaatttaaaatgtgaaatcagtcttacgcactcttcttttttcatgtccctttttttcagcaaggcatgatcgacccgaaaatgaatgatagcgtcccgctccctcggcacaatgtgaatatcagaagcctttgttagatatgcctcttcaatcaagtttttgcttaccttttctattgaatccaatttgattccctctcctttcaacgcatattgtagaaaaagaagaaaaggtaatcaaacagggaaaacgtgattttgtgagatgttatatgctgaaaaaccaattctttctggcaagaaaaaagactttcaactgaatgtacccctgtcattataattttccctataaataaaaaagcagacatggtcaccatgcctgctagattccattttcattatgctgttttcgcttattgaccagtatctttctcaacggaaagatcgcctaatgcaacaataccggtcatttggtcattttcaagaatcgataaactgcggatttaatgctctgtcataagccccttgacatcgtatccggtcaccctgatatgtctggtgaaaaagcggggcacgctgcacaaaatatgaaacatcctatagagtccgcctttttcgaggtttctttttcttcttccgctcctgcagcatatctcccgtccagcctttttttctcaaatagagatagatcagaactgtagatgtgacaatcaataagagggaaaagagatatccgtatttccaattcagttccggcatcactgaaaagttcatcccccataaggcacccagagctgtaatcggagtaaaaagcgtcgtgaaaatggtcagcgcttttacaatttcattccccctatgtgaggtaatgacttcctctgaatgcagcagattgttaagctccccttcaaattcgctgatgtatgtaaatcccctgtcaatcttcagttgtgtccgctgataatcctttttcccttcattttgaggtaaaaaggtttctttcaacgccatttcaatttttttagcgcttaatatcaaatttttccaaatcatcagttcatggcgcaggagatggacgcggtttaaaatgcttttgctattgtcgtctttaatttgccatctgagctttctcagcttgacttcaaattcatcaacaccgattaaatacgcattcattagttcgccgagaagaattaaaaacccctctatcgcattgtccgctctttccatttgccgaacaacttctttgcctttaatctctctcaaaattgaaaagtcaaagttgattgtaaaaaaatattgtctggtgatataaaagtgaaaaacagtatggtctttttcttcaccaagcccctgatcataaacaatcgacccaaatactgcttcattttccgtttcagttgtatctactcgcaaaaaattaacgtgatggttattttcaaaccacttttcacactgaggccagtgagaaaaatggattagatctcttgccttacttctttcttgaggccccatttggtaccaaaaccaatcctttcccgtatgtgccttcatgtcaagctcctccaaacttttgttctttattctttaattgcccaataaccgcgtcactaaaccagtctgccgcttcaacacatgttttatgagcattttcaggtggtatggaatgtagaaagacatcggaaaagggaggtgcatgccttccttggagaaggcagttgttttggaatttatcaatttactagcagtcgctattctcattttgttaacaggatttttcgttgccgtagaattttcaatcgtaaaagtgcggcgatccaaaattgatcagcttgtcgcaaaaggaaagaaaggtgctaaagcggcaaagcatgtcatcactcaccttgatgaatatttatcagcctgtcagctgggcatcacagtcgcagctttaggactgggatggcttggggaaccgactgtgcaaactctgcttcgaccgctttttcataaagcaggcttaaatgaatcgcttacccacctgctttcactcgtcatcgcatttttagtggttacgtatttaaatgtcgttattggggagctggcgccaaagagtttcgccattcaaaaagcagaaagcattaccttgttgttcgctaaaccgcttatttggttttataagatcatgtttccattcatttggctgttgaaccactctgcccgattgattacaggagtgtttgggctgaagccggcatcagagcatgagctggcttatacagaggaagaacttcgggtcctattggctgaaagctataaaagcggcgagatcagaaaaagtgaattaaagtacatgaataatatcttcacctttgataaacgaatggcaaaggaaattatggtgccgcgaaatgaaatggttagtttgtcactagatgaagactccatttcaaatcttcaggaaacagtcaagcaaacaaaatatacacggtacccggttgtaagagaggataaagataacgtcattggcgtgattaatatgaaagaagtgctgttttccatgctgacgaaagatttttcaatcaagaagcatcaaattgaacctttcgtacagcccgttatccatgtaattgagacgattcctatttataaactattgctgaaaatgcaaaaggaacgcactcatatggcgatcctcatagatgaatatggcgggacgtccggtttggtcactgtcgaggatattatcgaagaaattgtaggagaaatccgtgatgaatttgatgcggatgaagtgcctcatatccgcgaacttggaaaggatcattacttgttaaatgcaaaattattaatcagcgatgttaacagcctgcttggaaccgatttatcagaggctgaagtagacaccttgggcggctggtttttgacacaaaacatagacgctgagcctgaaagtgccatagaatatgatggctactcttttaaggtaaaagacatcaacagccatcacattttatttatagaagttaaaaaagctgaatagcccgtgaaaggctgttcagctgctatctttcaagataaacatggcaaaggcatcaacactcttttattttaaaccctttattggccagggctttagcaagactttgctctgttttcacattcgaaaaatccagacccagcttcacgacagtttgggcaatttccggcctgattcctgaaataatagtctcaatgccgagcaatttggtgctgtcaatcactttaaaaatttgataggctaccatggtatcaacgataggaacgcccgaaatatctaaaaataaatacgagagctttaacgctgagcactgctccagcacagactccaaaatcgtcctcgctctgtgcgtatcaatttcaccgacaagcggaagaatcccaattccatcagtaatcggcataatcggcgcactcaattcattaatcatttctttttgcgcgtttaattgtatcatggtcacctggtgatattcttccgtaaacacttcgatgatctcatcaatgttttgattcaagatccggctccactcataaaattcctgaatgctgatgtcttgagaagaagcttcgctgaatttatgaatccattcaaacatgatgtgcctgaaagtgttaaactggccgacactttgtgtaaccgtcacttcatgaacggcacggtctctggcgcattgaagagaccaccggttgagctcatcctctacgtcttcttttctaagggattttgctacgatggtcaccaataattcatgctggtcttttaacttttgttctagtttttgctgatctttcgctgaatacagccagctgccgtttgacgtacaaacttccagccattgttgcgtaatatcttttttgtgctctgttaagtgctgatcaagagctatcatcttaatgagttacctcctgtttttgaaaaatgtacgctatatatgtataacgcgtctgcctttacacatactatgtttagattcaatgggctatagccaagcggtaaggcaatggactttgactccgtgatcgttggttcgaatccagctagcccagtttctgaacaggtgaaaaaccgaagataagctgattcgtataaatcagcggatcttcggtttttcatcatgcagattgatgaaccgttttcttcttcgataacttcaacagttctcccgggttataaccaatcaccagctttttgttgtctactagaatcgggcgtcgcaaaagcttcggcttctcgattaaaagttccagcacctcatttaccgtcatttcttcaatgtttaaatttaaatttttgaaagtctggcttcttgtcgccaaaatttcatcaattccttctgtcgttaacgataaaatgtactttaattcttctcttgtcggggtttctctgaataagtgccgttcgttaaattcaatttgatgtgctttaagccaatgttttgtttttcggcatgacgtgcagcttggatatgagtaaaaagttaattgttgttccattcgttttttcctcctcagttaaccatctctttgtagaataactacccggatcatttttcatttaaaccatttacagaacttttttcggattattttttaaaaaacattcatacaatagaaaacacaatcaaagggacaaattccatttgtatattaataatgaaaatgtttacatttctaggtgtgatctattataataacagtcagagggactctcgggaggggataaaaatgaatcgcatgttccgggtgttaggattttggacgggaatttttgcagtcatgttttatttaggtgatatgaaagatgcttcccttttattttttggacagacgatcttatttgtgtttctatcgtatttgaacttaaccgaacgcatgtatatttatatttttggcgcttatttaacaattttcttcgccggctttacatattactcaatttttattatggtgcccggcggcggaggccattaaatgcagaaagagacaaaccttatcggtttgtctctttttttacaatgaaaacccatttaaaaacggattttgatcctgctcagtcagtacgtctgtttcaggtccatggccgcttaacaccagcgtgtgttccggaagcgtaagcagtttttcatgaatggacgtcagcagcgtctcttgattgccgcctattaaatccgtacgtcctataccgccttggaacaagacatctccggaaatgaccaagtctgcatctttcacgtagtaagacacactgcctggtgaatgtcccggcgtaaataatgtttccaaatgaaacggcccgatattcaactcaccgtcgccttcaattagatgatctgcaggcttagctgtgacttctatccctcgcagcatgccggagccgtttaaagaagcgtccgcaagccaatttttttcattttgatgcaggtaaacagggatatcccatttttctctcacttcatcaagcgccccaatatggtcaaaatgggcatgtgtaagcaaaatggctaaaggcgtcagccctttttcttttatgtattgattgattttatgtccctcgccgcccggatcaaaaatcagacattgatcatcactgatgagaaaatatgcgttcgcttgaatcggccctactggcattcgtctccatttcactattatcacctctttcttttttatgctcttattatgagggtttttgaaaaaagattcaaacaatcgcaatgaaaacgctatcgacaaacctataaaaaacaggtagaataaaactggaaagaattgcaggtttttcaatgtaaagggggctgtgttatgttacttgtcgtgattttcggccttgtcgctcttttcgctttatggggagtcttgcgttctgttagaaataaaaatatactcgggtttttattagccggtgccaccttatttgtctttggatggtttaccgtgatgaccgtaataaacagcgggtatccaaccgcacattaaaacctgtatccgatcggatacaggtttatttttatggctgtaaatgtttattgacactttctattttgctctcaagcgtcgtttttttgtcacgcctgtcatcgatacggatattcgttgccactctgtgcaatcctttttgaaatggcgcttcgtgaattgcctgaataactgcaaaaaggtcactgagttctccctcgatcagcgtattcatcggtgtcagctgatatttgattttcccttctgcttgatatccttctaatatcttttgcacatcggctacgtaagcactgacactgggtgtttccgtaccgattgggataatggttacatctgcgatagccatcgttattccatctccttttgatcaatgatgagttgcttcgtttcatgtgatttcaataaaataatttgctcaaaatgaaagccgtataacgcatatttcccgttcggagatatttgaatcggctccatttcccgcagagacacaagatcttttgtctctcccgatgctacattgattgctgcgagcttatatgcatcgccgctttgtttgaatgtataaaacaggcctcctgcttcatcatagtcatactccattggagccaaacttgtatatttcgcttggagcggccatttcgctgtaacaggtgatgttgattgcggcgttttaaactgatacgtcccttttcctccggaagctgatttgacagtaaaactcatttgatggaaagaatcgaagaatagaacgttatcctcaagcttctgttccgtcttagaagctgtatcgaacgtatataaaggccctgttttatcgtctctaccctcttttacataatcaaatgtatttttggatgtccaatgaatgaacggaacctgtactgggcttaagaaagattcgtcttttttagcattcacctgatatgtatggaaatcccagttttcattgaattccgtcaccatcatttgataaggatcatactgattccaagcagcttcaagctcatacgtttcgtaatctttttcgtaaagcgtctctccttctgcattaagcaaaaccactgccgtcttttggctatgtgtgatttgcagcagaatcatctgctccctcgcattgatttgaacatcaacgatttgaccatccgtttgatagagctttttcgctttgcctgtaaagatgcggtacgcaaaaagctctgttttcgtcggattagacgcagtatataatattgtgctgttattcagccagccttccgccccatccgctttttccgcggaaagcggtatgatgtcttttttctcatcttttgccgccgatgcctgtttttgctgctgatgagatggttcgcatgccgataaactaaacagcaataccgccagcagaataaaacaaactgatctcatcagcattcccctccgatcatctttattctctcatatttgcttcggcagaaaaaagaaaaagtttcagttactcatgaaaaaataacgccctccacaagataccgcttgtggcgttatatatgtgtgaaaactgctgaaacggcaaaggattttggccttttccaagttccaccgtatacccttccttaaaataatggtgaataaaccaatcacgaaatccagcatagctgtctatatcccttactcccttataaatgttcccgcttaactcctcaaactcctttatgacggcagcagattcctcaggctcaaggcctttatagccccaataaatttcttctccttgagtatgaagagccagcagtctgtcaggcggattctccgtgatcagccggtacatcgcaatagattccggctccgtaagcggagagattcccggaaaatcgcggtagctgggtgctgtcggttttcggtatttttcaatttcccataatgatggaaattgtttatttaaatcaaccccgtttatattcgccttccattcattaaaatttggacgatgttcatttagcctttcgagttcatctcttctggctcccatgacttctgatccgtttaaaacaagatcaacgccatccggattgacaagaggaacgagggataaggatgtgctgttaaacagctttatgggagaaaagccaaagaaaggcgaattgcagcataatgacatacagtattccttaaaccattttagcaggacagacgttgtaatccactcattcgcatgaaatgacgcgttcatatggaccttttttacggcatgctccccaccagccttcagctcccagataggcctgccgagtacagaacggccaatttcccggcatgagacaaacggaaaaacatcaataatcttctttatttccttttcaacagctgaatcatcatagattttctcttgctcaatccagctatctgaaagtttcagctgccgaggctgtaaaaagcgctttatgtcctgaatggtttgaagctctttgccgctatgctcctctatcacataaccagggcaatacaattgatgtttttgtgcggagcgatttgcacttttaagcaattcctcgtctatcttcagttctttcgccacattggccaaattgttcttgatctcaggtttcaccgtaataaacgccatcatcatcccccttttttgttactatatgacagcgtatttaaaaaaagaaagcctcccgctcacttcgatgcgggagacattgtgattatgatgcctgatcaagcatttgtttttctttccgctttgacgaattgtccagccttttctggtcataaaatcgcaacaaatccccataaatgatttcatcagaaagtgatagctcctgttttgctttatcagcaaatgcttcacattgttttgtctcttctaacggttttcccgtctctttgtcataacacgcaccgtctgtataaacaacctgatctgtgataaagctcccgtcccggagcaccgtgaagtccagtttttcgtctgaaagcagatcgttgccgaattgaatttgatctttcgtatcaatccctaaaagattcatcagcgtcggcctgatatcaatctgcccgcctactgtttcaatggtttgcggctttttatcagtaatacccggaatatgaatgaccagcggcactttttggagctgtacctcttcaaatggggttatttcttttcctaaaaactgccccatcgcttcattatggttttctgatataccataatggtcaccatataatacaataacagagttgtcgtataacccgtcttccttcagcttttcgataaaccgtttcagcgcctcatcctgataacgcactgtcggaaaatatttatttagcgtctggctgtttgaatcatattcatcaatcaattgatcctcttcatcaagatcaaacgggaagtggttcgtcagtgtaatcagcctcgagtaaaacggctgaggcagatttttcatcagctctgaggactgctcaaaaaattctttatccttaagtccccagccgactgaattttcgtcagttacatcatacgagttaatatcaaaaaacgaatcatatccaaatgagtcgtacattaaatcacgattccaaaagctcttattattagcgtggagcaccgctgaatagtatccgctgtttttcaaaatttcaggagcggccatatattgattgcccgcattcgtaaaaaatacggcacctcgtccaagcggatacagtgaattgtccacgataaattcagaatccgaggttttcccctggcctgtttggtggtaaacattattaaagttgtagctctgttttataaagtcattcagaaaaggcgtgatttcttctccattcaatttttcattaatcacgaagctttgcgtcgactctaaggatacgagaatgacgttccttccttttgcagcgccgaataagcgtttgttggcatccttcgcattagcggttacgtagttttcaatctccgtcaggctgttgctgtctgccaacgctctctgtgcggattgctttgactgaagaacgccatcgtaaatatgaaaattaaacaggctaatgtttttaacaagcatttctctgtcaaatgagcgtgtcaatagctgaggtctttccgcctcagacaagcccaggttgaagaaataaacagaagcaacgaacaaaaaataagccgcccgttcatttttcgttgagggaatgtccgattgaaaagctttttgccggatgtgaagccatattaaaaccgcaatatctacagctaataggaggtctgtcggctcaagaagtgttccgatgctgcttccgagatcacccatattgctcgtttgaaaaagaacagggattgttaagaaatcattgtaaaaacggtaaaaaaccatatttgccagcaatacaaacgtgacaagacagctcatcgcgataatgtagcgatttctgtttttgccttttaaaaacaggctgaggccaaaaataagcaacaaaaaactcaatgggttgataaacagaataaattcctgtgttagattgtcgattttaatatgaaaactggttttgtaaacagcatacgttttcagccacatcaataaaatggcaatcagcataaatgaaatcttcgaaaaaaacgtttttcgcatttcaacctcctatgcagcacgctcaaaaaaatcagtctattcccaacattctcattaacacatcaaattaaatcttaacctgagcacaacaaaaaatcaatttcatttacacaattttaacaattttgatgtttcagccattcatttttagcgatccaagcgcctccgataacgccggcatcatttccaagtgctgcgattgaaatatcagcagcttgggctgcccgcggaaacgcgcatttgcggaatgttttctcgacttttgatctcagcagttctccggctctcgatacgccgccgccaagaacgattttggatggattaagcgagcttgccaaatttccgagcaccaaaccaagatgcttggctacataatcaaccacctcaagggcaatttcatcattttcacccgccgcttcaaacacatctcgcgctgacaattgttcggttgcttttaaacgtgtcgtctttttagcatttgctattttttcttttgcaattcttacaattccggttgctgacgcaattgtttcgatacagcccgttttgccgcagttgcagggcgctccgccttcagggatgctgcaaatatggccgatttctccgccggcgccatttataccatgtacaatttcaccatttgcaatgatgccgccgccaactcctgtgccaagcgtcacgagaatgacgtcttttgcgccatcacccgctcccttccacatttccccgagcgcagcaatattcgcgtcattttctataacagctgggatgccggtttctgtctccagatggtttttcaaagcataatttttccaccctagatttactgtttcataaaccactcctgccgccatatctacagggcctggtgcacccattccgatgtatttgatgatgtgcttcggtttttgcagctcatccagcttgctgtcgattgtttttgcaattgtgacagtaatcgtgtcgccggttttatctgtcggaacttcccacttatgctgaatttcgccatattgattaataaaagcgagtttaatcgtcgttcctcccaggtcaatgcccgcaaaccatatctcgtccatttttatcaccttagcctttataaaaatctcttccgttttttgtttgttccaattcttttcgaaggacagctgccgctctggcccactgctccttttcaatcatgtggttcatgtataattcctttaattcatccagcataaactcaatttcaagctctctgtctccaaaataaacaatgtggccaaacgtttttaacagctgctgcacatcataaaatgtattcattttcctcaccatttcttgaacttaactatcataagcgtattcataaggaagcggtcagtcaagaagaaaacgctgacaaaaaagccagcttcctttccatattccacctctatgattctttattgttttcaatttgccgctgcagctccttgtagcgctgctccttcggcttcagtttcacagccgtctggatggccttttctgcttgtgcaagctcatttttttccgcatacaataacgctaaattgtaataggaagcatggtctttaggttcttttttcactgctcgttccaaaagggaaaccgcctgatcatattcgccgatttgaatatcagaaacagcaagaattttcaaaagatcggcagaggcatctttttgcgctgcttctccgttcagcaattctgttacttcttcatactttccttcctgatacagctcgcttgcctgctgaatcagcgctgactcctggtgtgaaggcgaatgcaatccgtaatataaaaatccaacagccaaagcaatcagcaaaaccgctgacaacaatctttttccaaaggctccggctttaggcaaccccagtgctgctgcagcgaaaaagccgccaatcaagccgccgatatgtcctgaattatcaatattcgaaaccgcaaaaccaaagcccagattgatgataataatgacaataatattggttcctatagttcttaaaaacatttttcgattagacaaagcaacatacagtaatgcacctaagcatccgaatatggctcctgatgcccctgccgaaggatacgggctgaacacaaaactcgcaatcgaacccgtaatgccagcagccagataaatcagcaaaaatctccccgatccatacatccgctcaaccgctgtaccaaccgaccataaagccagcgtattaaaagctaaatgcgctatgccgatgtgaagcacgatcggtgtcagaagccgccaccattctccttgtgcaatcaggctgttttcttttgctccaaaagccaccagtgtctccgtattagtgctgcctccgtttatttcgagcaagaaaaacatcaggatctgaagcgcaataaataaatatgtaaaagtcggttttccgttttgaaaaaccgccgcttcagtttttctctgttcttcttgtttcagcactagcgaaaggaagcgttctcgcgccatttgcgcgttttcaaacgaagcgtgttcctctgaacaatcttctgtacgaaatgatggaaaaaccgcttgaagatcatctcgaagcatcgttcctctaacgatcgccggctcaactgacacagttcccttctcaaaagttttttttgcaatctcttcccagtcatcaactggggcttccgttgaaaaaaacacgttcagcagcttcatccttcgtctgcccaattgatgtctgactcgttctactcgttcggcctgctcttcgatgtctctaaccatttcttgacggaaatcaagatcgtgcttataaagacgaactagatcatgagaggacttgtccggcgcttccagccatatttcatctgactcaccggcttgtatgacgccatacccgctattcaccaggtgcgccgcaattttccaatatgtatactccagcaaaaacatgtttaccgctccaatagttttttttcattataacagctggcgctccgaaacgcctactgaaagcaaaaaatcccgtttttcacgggattttagaaagcttgctgtataaacttattgcggataaatggaattcttaaaaacaaatggataaaagaccgcctgattcctggctggctgagtacagtattcataagacggtagcgattttgataaaacatgacggcagaaaccgcgaaaatggcatatatcaaaagttttttcatgatatccctcctgccaatagggtttgttattctaccttatttattctcgaataagggacaggaaagttatgaaaaacaagaaataatccgatcctctgttatcagcttatgtaccgggatgtcatgcggcagacggggtacgtgcgcaaacaactggcactccaaaagcaaagagactgtcttcccttcatattcacttaaatagcgatcataatagccgcctccaaagccgaccctaaacccgttaacatcaaaacaaacacccggaacgatcatcaagtcaatttgtgatgggtttacttcttttgttttttcaattaccggctcgagcagtccggcgtacacggtttcgagctgatcatcagtctgatatgtgcgaaattgcattttcttcgtgtccggatggcattttgggatgcaaacttgtttcccttcttcccaagcctgctcaatgacaggacgcgtcggtatctctaatcctctggaaatagtgacggcaatggtgccggcattttgccactccggcagagaaaacaagtacttatacatacgttccgttttttgaagaatatcttcatttgataaagcagacagtgcctccagcgtcttttttcttaattgtgatttcatctctcatccccctcggaatagaaaaaaagccagaacctttttcaaagctctggcttttttcttacacctcaaacagcaaagctgttattttgtttcacggtgtaacgtagattttttatcacgtgggcaatattttttaaattcaacgcggtctggattgttgcgtttgttctttttagaaatatagttacgctcaccacattcagtgcaagccaaagtaatattaacgcgcattattttccctccaaactaaaatcatttacttattcagacttatatataataccactataatggacggaatgctaggctgtttttcaatgaattgctgaattattgaagatacgctcataaagctgcaaatatgatgacataatgagtcgggggtggtggagcttgaacacttgttgtctgccagcttcttttatccggcgggctttttcccggtcttttaaaaaactgtccagcagatcagcagcttcctgtacgagcgtaaaatcagcgatgattgccgttttgtcatgaaccgcataatcacaaaaaccacctgactgagaaacgacagtcagcacaccttgttccatgctttcttgcgcggcaagcccaaacggttcataagaactagggaaaacagccatttcacagtgagacagtaacgttctgatatctttcctatttagaaacggcagaaacatgacgcgatccttcaggttatatgccgcagccaatttctcatagcaggacagagacggcccctccccagccagcactagatagaggtcaggctgacgctgcttcaagatggcaaacacctttaacagctgcgataatcctttttccggaacaaaccttccatatgaaaagaggaatcttctattcatgcttctcgggattttccccttctcttcctccatagatgcagggcttgggataacggttattttcttatgtgccgccttatcaagagaccgcttcataaatgtgcttaatacgatcaatgcatcagcggattctataaggagccgttcggtcatgagcctgtatgggtgtggggcttctcggcacaccttcttcctttcgctttcaagaccgtggattgtcgcagcaagcggaaggccaagccgttgtttcaaatactgggcggcaggggcagttgtgtcatcatgggcatgaatcagatcaaagcgtttattgtgtgataacacatggcgaaccattgtaaagttagcatcagctatgtaatcttcaaacttcgcatacgaaaacagctgcccgctcggagtaaaaaccgtaatgttgatatgagggtttaaataggaaatgaggcggtttaaatggacaccgagcccgcttttcggctcatcgggatgttcgggtgaaagcatgagaatgttcaccgttctttttcccctctcccataacaggtgtatgcagaaaattgcgcctcccacctggtgtgcgcttcttcaatctgaaaactgtttatatgacgaatcccattttcatcaagatagatgtcgtctgtaccggcaagcttgagagagacattcattgaattcacaattctgtattcagcccgatatacagcatcaccagccgcctgtctaatcgtccattctcctttatcatacgttgtgcgttttgtcctgacagcttcaatgtcttttcttttgatgacaatgcgcaattcttttatcatatcctgcgttttttcgaaaaggaccgcttcagccagccgcattgtttcttctgagatttcccagcttacggtcaaggtgtgagcgttttgaatgattatgtcgaatgtgtccctaaaaaaggaaagcttatgtcgtatattatagggaaatgggtgtttatccatggactcctaacattctcctttccaatcgttcacttcgtgttcctattaaaccattacatgaagaagaagcgaagaaagatttctcgacaaaatctcgtttttttcgcgaattcctttagaaactattggttttatggtataaaaaagaaggataaaaaaagaatagaaggtgatgaaacgtggaaattgctattattgcgttgtttatcgtcagtatagcgctaattgcattctcatattctcaaagagacccgatgaaagatgtagaacaggagctcgaaacactgcagctttctgcgatgcaggaaatttacaagctcaaaaagaaaatgacagtgcttgaggaagaattactggaaacaaaccttgtcattcgcaaatcaaagcagaacgacatcaatcaaaaaatcgctaaacaaatactttctaaatataataacggtatgtcagctgaagcgattgctaaagctgaacatgtatcagtggaagacgtgaatacgattatcaaagataatgagaaggtgctcgtatgacaaaacggggcattcaggcatttgctggcggcatcattttagcgacagccgttcttgcagctgttttttatctgactgacgaagaccaggccgctgctgtaaaagataataaaacagtaaccgaacaagacgtgaacaattatcttgattctaaaaaattggtttctgtcaaccgtgatgaatatcaaaaacttctcgattcaaaagagaaatccttaaacaatgacagcggctcagacacgaaatcagacaaagtcaaaacctacaagctcaccattaaagacggcatgagcacggcggatgtatctgctattcttgaaaaagagggcattatctcttcggctcaagactttaatgactatgtcattgatgccggctatcacaaagaaattcgtgccggcgagtttaaagtaaaatcagacatgagtttcaaaaagatcgtaaaaacgttaacacgataaaaaaacaggctgactcagcctgtttttttcatccaaactttcctgaaatgtaatcgagcgttctttggtccttcgggttagagaacattttattcgtattgtcgcattcaacaagctcgcccatgtagaaaaaggcggtttgatcagaaacccttgctgcctgctgcatgttatgcgtgacaatgacaattgtatatttatctttcagctctagaatgagttcttcaatttttctcgttgagattggatctagtgcagatgtcggttcatccatcagcaaaatatcaggattggtcgcaagtgctctggcgatgcaaagacgctgctgctggccccctgacagcgaaagagcggacgtatgcaatcgatccttcacctcatcccataacgccacgtcttttaatgacttttccacaatttcctgaagcttcttcttatttttggtgccgtggactctcggtccgtaagccacattatcaaaaatagattgcggaaacggattccctttttggaataccatgccgatattttttcgcaaatccacgatgtccactttatcctttaaaatgttgctgccattatagttcagctcacctgcaagctttacattcggcgtcatttgaatcattaaattcaatgtcttgataaaggtcgatttcccgcatccggatggtccgataatcgccgtaacctcattttcataaatgctcaaattgatattttttaaagcatgatgctgcccataccataagttcattccattgacttgatatacttcctgtttcattacagcttcggtagcaatactcattgccgccctcctatccgaatttcccgttaatataatcctctgtcttttgctttttcggactcgtgaaaatctgttcggtctgtccgtattctacaagctcgccgtttaaaaagaatgccgtccggtcagaaacccgcagagcctgctgcatattgtgcgtgacaataataattgagtattctcttttcaatcctgtaattaattcctctatttttgcatttgaaatcggatcaagcgctgaagctggttcatcaagcagaagaacagccggcttcatcgcaagcgttctcgcgatgcataaacgctgctgctggccgccggataacgagagtgcggatgaatgtaaacgatccttcacctcatcccagagcgctgcttttgttaaactttcttccacaatttcatctaaaacagctttattccgctctccggcatatttcaatgcatgtgtgatattcgcatagatcgatttcggaaatggatttggtttttggaaaaccattccgatttctcttctcaagctgacaacgttaatattgccgcccaatatatttaatccctcataaaggatttcaccttccgctcttgcagatggaattaaatcgttcattcggttaatatttctcaaaaaagtagattttccgcatcccgacggcccaattaaagcagtcaccgcatttttttcaatatccatgtttacatgatgaacggcttgtttatttccgtaataaatggacagatctttgacctcaagcacgtggttctgcttcggaacaataacagctcgctcaggtttttcttttaccatttgttcagacatgtttttcgcctctttccgttctaatttgccgtaagctttttgtagatcatcgtgccaagccatctcgccgcgagattaaacacaagaacagaaatcaccagcacggcagaaccaccgttggcaatcgcttcagcatccggaatcattccttgtgtattgacgttccaaatgtggaccgcaagtgtttcagcgggcctgaaaatattaagcggtgatgtttccgaaaacgggttccactccgtaaaattaagacgcggtgttgtcaggcctgccgtaaataataatgcggccgcttccccgaacacccttcctgacgctaaaattgctcctgtgatgatagaaggaatcgcacttggaattaaaactgtttttacggtatgccagcgtgatacacctaaagcgagagaggcttccttcagatctttagggactgaacggatcgcgtcttctgtcacacgcaccatgacaggaaggttaaaaacagttaacgcaagcgctccgcctatgatcgtataaccccagcctgttaagttgacaaacatcaataatccaaacatcccaatgacaatagacggaagagatgaaagcacctctatacatgttctaatgaagtcagttactttgttattaggcgcgtattcagccatgaagactccgccgcccacaccgagcgggattgtaatcagcattgtaataaacaaaatataaaaggagttaaacagctgatctcgtatgcctcctccagctgcaatggcgctcgactttgttgtaataaattgaaaactgagctgagaaacaccgtttataataatataggaaaacaaacctactaaaatggcagcgataatggctgcacacaaaccaaacattccggtcgccagtttatctgttattttgcggttcattacactttcctcctagatgacaagtagcgaataagcaggatgaacaagaatgacatcaccagaagcacaagccccattgaccacagcgtattgttttcaacacttccgtatgtggtgtggcccatattcagcgtgatgatcgttgtcagcgttcccgcagtgtcaaacgggctttccggcaatactcttgtatttccaatgaccatctgaacagccaaagcttcaccgaacgcccgagccatgcctaacacaacagctgtcatcaatgttggaaaagctgcaggcacaagtacttttctgatcgtctgccatcttgtggcaccaagcgcgtaagaaccctctcgtaaactcttcggaagagaagccattgcatcagcagaaatcgatgtgatcgtcggcagaatcatgacggaaaggacaatcgttcccgccaataaactgtgccctgttccgctcgatttgaactgggcgataaacggcaccaatactgtaagacctatgaatccataaacaacagatggaataccgactaaaagctcaatcaccggctgcagcactttctttccccaattcggggcaatctctgtcataaaaatcgcacctgcaatgccaagcggcgcagcgattagagcagaaagaatcgttactgcaaatgagccaaaaataaatggcagcactccgtatttcggatcactatctgtaggattccaatttaagctcgttaagaattcaattgggcttacaccatttacaagaaaagattgcagccccttaacgccgaggaaaatggtaatcgcaacagatgccgcaatcataatcagtgcacaagctgtgactatcattcttccccgaacttcatccaattgccgattttgcctagagctgattaagcgctcgctcacagacatattttctctattgtttatcattgttttacactcctatgaatgtgttaagaggagaaacggttgtccccgcactcctctttttattaagatcagctttgcttcccgttggcatcacgtgtcactttcatatcagtaaccggaatgtagccttggtcagtaacaatgcttttttgaatgtcttcactctttagataatcaagaaattctttagctaaacctgtcgcttcaccttttgtataagaatgttgataagcccagatcggatactcgccagttgctacatttttcgcttcaggtttaacaccgtcaatagatagagcagttactttgtcatctgttaaatatgagaatgcaagatatccaatcgctcccggagtatcagcaatgatctttttcaccgtgttggaggaatcttcagtaatgccttctgcaggctccgctccgtcaagcgcatatttcacaaatgtagcacgtgtgccggaagaatcagggcggtttacaagtgtaatcttttggtctttgccgccgagctctttccagtttttgattttgccagtgaagatttttttcaattcatcttttgaaatatcctttacaccagcatcagggtttacagctgctgccataccaactacagcgacttgatgatcgacaagcgcttttgcatcgatgccttctttttcttcagcaaaaacgtctgaattcccgatctgaacagctccttcagagacttgagaaagccctgttccagaaccgccagcttgtacctgtatatcagcatcagggttttcttccataaatttttccgcggctgcaagtactagtggctgcattgccgatgaaccagaaatggttaaagaacctgatgccttttcttctccttttgcagaatcgctattcgattttttactttctcctgcatttccgcatgcagctgcaatcatcataaaagcagccatcagaagcataagcaccaatttgttttttttcatttcctgaattccccctgcgtataatgtgtaatttgtcctacacgtatagagtaaaggttctatgtaaaaagggtttgaaccgaatgttaaggttttgtaaatcagtgcgtttttttgtataaaaaaaacgcccacatcatgtgagcgtttttttttagttatcagaagacgttgtgttttctgcattttcttcaattttgtctttattcttttgctgagtaccttctttgtcctgcttcgatttcagctcaaaatatttatccattacttccctgccgatttcgtttgtaattgagtatctttgattgtaatcaatgtaagtccaaggaactacgacagaaatagcaatctcaggattgtcagctggtgcataagccacaagcgtcgtattataagtgtctgttcctgtttttgatttatccggtccgtcgtaaaatgattgggctgttcctgtttttgcagctggtttatacgatgctgaagccagttgacctgcagctgtccctttagtggcaacccgtctaaaaccggcttggacctcttcaatatagctactcttcatatcgactttattcaatacttcaggctgaacagaatcaacgactgcgccgatcccttttttcgcatttgaatctctgacttcctttacaagctgaggcttcatgcggtagccaccatttgctatggtggagacatattgagccaattccagcggtgtataagtatcatactgtccaatggcgaaatcaagcaagaaaccagataatctgcttgtacctttatatcccgtcatttcatttggtagatcaattcctgtttttactcctaatccaaattgactgaaataatttctgaaggtatcaaatgcagaagtatccaaaggcaatgcttggtgaggtttatattcacctttaccaactgcaattgctgttttaaacataaaaacgtttgatgacttctctaatgcagtttgaataccaaccggccctaagttttgccaagattttttccctcttttatcctggccgatatacaatggttcatccttaaatacagtattcaaattaatcgctccagtttgaagaccggtcaaaacggttgcaccttttacagctgatcccatagcgtaggatgaagtcatggctcctaatgcataatcatcaaacttataggctccattttctcgtttaatctgcttccctgccattgtcagcacttcgccgtttctagggtccatcatgacaacgaatgcacgatccaacaattcggtactaggtcttgctttagcagctttaagttttttctcaataattttttccactgatttttgcaaatcaatatcaattgttagtacaagatctttcccggctttgccttcagataccgtttttgttcccgtgacattgccttttgaatctgtgatattttcgacttttgctttttggccctgcagaaggctttcatattggtattccagatagctttttccgaccctgtcatttcggctgtagccaagcgacagataatggtcgagcaagttggacggcaatccttcattagagctggaaacacttccgagcactgagcgaagaaggtttttataaggatattcacgttcccaatcggacgtgacatcaacacctggcagttcgtctaaatgttcacttaccactgccatttccttcgctgatacatcttcgtttttgatatattgaggggtcaatgcatagcccgaatccatctgtcttttgatagcaaggatctgcatatctttatccgtcaattcattcagctgcttatcagtaatccgttttagctgaagctggtataaatcgtcatcggatatttttttgtcttcaacctgctgtctttctttagagctaatgagctttttcgcttctttcggtctagtcaaaatccaataatcttttttatcccgttctgttactttttttgtatcgactttgatcatgtcagacagcttttttgcgatctttaagcgctgttcttgcgtggtcgatttagatctcgtgtatgtgattgcatttaaagccttatttgtcacaatggcattaaagtttcgatcataaattttcccgcgtggtaccgctgagctgacttcactttgttcctgcttattcgcttggtttttgtaatcatcaccttgcacgatctgcttgatgcccagttccacaataatccaggtaaatataacaaaggcagctaaaaataaaatattcagccggatcggaagcgacttctttttctctttatgattttgcttttttggtttatttctcctcataacatcaccttttctatttacagaaagaaaagacactcaagtaagagtgccagttttcattttaaaggttttttcgacttttttctacagataacccctttttggcaaaaaaattatctctcgccttttaaaagggtcggttctgttacccgtttttggccgtcttcttccatggtttcattttccccttctttctccttaaaacgaatatccttgacaaagtaataaatcaaaggatgtcctatacccaatatcgcaagtgacaaaggaattcccacatcctctttcagaagggccacaatcaggagaaagcacaaaatggaaacaattctgccggcgttcaagaacatttctctaagcacgatatattcaattcttgcttttctggcatgcctcgcgcgccctatcacatcatatgtaagtgatacatatggcacaagcaacagaggatagccgatggcaataaaaacgccgtacgttaataatgtcgaaaagctcatatggaacagaatcaaaaacagcgcgccatacaaaataagtccgcccagcaaaatcgatttttttctcgcctttttcttaatcagcctggatgcaaagtagtaggcaaagaaggaaacagctgaattgacaagaccgaatgtaccgagagcaagctcgctgtttgtctcaataaatacaaacacactgattaaaaagacaaaaatcccttctctcaaaccctgaaaaaaatgcgcattcgtgattctccgccaattcatattgctatggcgctctccaaatactttgctcagcataaaacggccctttgattctctccgttttaagaaaaagctcatcacgacagccagggcaaataaactgagggagagactgaaaatcactgtataacccgtattattttcaagccttgagatcacgaatccggctacaatcgggccgatcattcctgcagaggaagacagaatgcccataaacccgttgaaaaagtctcgtgtatccggctctgttatttcaaaggtcagcacgttaaacgctagccaataaaagccatagccaactccgagcaccgcgccgattagcacgaggcggctggccgccgtttctccggctaaaagcacacttaaataaaaggcagctaaaaaaatgacgccgaaccttaaaatgaataccctgtctatttttttggctaaccgtccagccaaataaaaggttatcggctgcattgtcacaatggataaattatatatcgccaaatcaataaatttccctgactgcttccaaagatacacattaacaaatgtattggacagtgcaattcccagcgagtaaagcccgccaatggtcagcagaaagagtaagcctttgtttacgtctacatcgcctatcactttttttagtttgctcattactgactcccctttactatcccttagtctgtctcactcaaaccgagatatgtaaaaagaagacataaaaaaacaaggtcccataatgaggaccttgtttgtgccattattttgcttcgctgtatagacgagccacttcgtcccagtttacaacattccagaaagctgaaatgtaatcaggacggcggttttgatagttaaggtagtaagcatgctcccaaacgtcaagacctaagataggcgttttgccttctgaaagcggagaatcttggtttggcgtgcttgtgatttcaagtttaccgttgttcacaacaagccatgcccagccagaaccgaagcgtccagctgctgctgctgcgaattgctctttgaatttgtcaaagcttccaaatacactgttaatctcttcagcaagcgcgccagtcggttcgcctccgccgtttggagataaaagtgtccagaataatttgtggttcgcgtgtccgccgccgttgttgcggactgcagtgcggatgttttcaggaacagaatcaagatctgcaacaagctcttcaactgatttgttggcaagagcagtgtttccttcaaccgctttgtttaaatttgtcacgtatgtgttgtggtgtttcgtatggtgaatagtcatagtttccttgtcgatatgcggttctaaagcatcgtacgcataaggtaattctggaagttcgtaagccatgataattcctccttagtatatatgtactgaaatgccgcttcacagcgagcctttcttcattcaatgtaacaaaagaatgctttgtaatcaatgaaaaagctcacgatttggctcatttcagcggacatatttcactttaaccgataatctgccccattaaacctgccgccagcatttcttataggaccgtccataaaaagtaaccgatcatcaaaagctgtatgatgccctttgcaataacccctgttaaaaaaccaatgagtgagccgaggccaattttaaacgctgactttaagtccttctgatggacgataagttctgcgcaaacagccccgataaacggccccaatatgatccctgcaaccggaatgacaaaaggcccgattaataaaccgatcgtgcttccccatatggcagctttgcttcctccgaacctttttactccaagcagattcgacacgtaatctgctgcgaataatactgcggcaaaaactgcctcaacaagccagaacatataagaatacggactgaatgaaaataaaaatccgtacaatacaaatccggcaacaataaatactacgctaggaataacaggatacaccagcccgataaaggcaatgataaaaaccgctgcaatcaacagccaatacaacatatccatagcttccatcctcccattttactctgtcttcttcatgtcttccttgtattcacacgcatgcaacgatacaataagcaacatatattagtttagctaggaagtgaagatagtgaatgtgtttcagcttttcattaaaagtacatactctccccgtgatattgcaaaaacaagatttcaaggaatcggaaaagcgattctttatgtatttttgctctctgtcctgtttgcaatccctaccgcttattatgtaagtacagggaccgtaaaatcaatgaacggctttaaaactgttttaaacaaagatttccctgatttcacaatttcaaacggcaaacttcaaacggatgagaaaaaagccacggaatctcaggcaaatggtttcgttatcgtgttcgatccgacagactcctatggcactgaacaaattgaagcaaagcaaaacgcaatcggcatccttcagaacaaatttgttttggccattgacggacaagcccaagaaatgtcttactcaatgatgccgtcagagttacagaaaaaagatgtcattgcaggtttaaaccaaaataaagcgatgattgtaactgttctctcagctcttatttttctcgtaacagcagcgggaaaatttattgaagtatcgtttttagcgcttatcgggttaatcattaagaattcgcagaaaaaacatttatcctatcatcagctctggaagctttctgcttattccatcacactttcaactgtattctttacaatcatgcgggcactagaagcaaccgtaccaagtgaatttttgctgaactggtttgtcaattttgtcatcctgtttctcgttttaaaagagattccgtccaaaaaagtaattaataaaagttaaattatatttatttttatcctttaagtagagagtgtgaaagcatttgcattaactttttacttaagggatatttaataaaatgtatagagcttaaacagatacatttataaaaaaagctctacaattactcaagaacaagctctggacaataatatcagaagtagtaagatgtaacatgaaagaagttcttaacagcatttgacatatgtttttaacaaaataagaataatgttaaattttaactaatagactagttaaaatcatatggcaaaatattttgcatcctttcacaacatatttacataagatagttgctatttaaaaagccaggtaccaatagggcacctagctttcagaattaaatcatcaacaagttagaattatcttctttccttctattctcattattgaactgttatcttttttgtgggtttatgtatacaaatgcagctcccttagctttccccttatatactgataaacctactgcccaaggtgttcctgtcggttttggtaatttactgaagtaaaactttttggttggagttctacttgaaaagtaccctgaatattgcgggccaatgtccccaccctcaactatagatacaccaaagctcttataatttagtttaccgcattttccatttgtttcggcgtaagcatcaatagatgttgcactcttagtatatgtataagcatctgtaataactcttattttacaaccagaaataccacttaccggttgccaaccactgcttgcagcctctgctttttctttaggtgcaactaccaaagttaacattagtagcaaaattaaaaacacagaaaattttccttgcttcattttgtagatcctcctttaaactattacataattatcctaacagatccattgttcattgtaaataatggaatacgagttttatattataaaagcctctttttgatctaattttgcactattttctattttctatctgaagttaatgtttagtcgaagaaatcctgtcaaaaaagcgcctgtataaaaaccgagcattcgcagtctcttttcttttgtcatgaatcgaaatggacaagcatactatggtataaaatttcgtatgcgggaggaaaagcgatgaagcgtctcaccttagtatgcagcattgtttttatactttttattcttttttatgaccttaaaattggaaccatacccattcaggacctccctgtctatgaagcatcagcaaaaacggctgtacaagaaccggcttataaaacggtgaaggtaaagccgggtgatacggttatgtcgatagtcggatcagcaggttctccggatgacattgtaaaggattttgaagcactgaatccaaatgtgaaagctaacgccattcaagccggaacagcgtataaattcccggtctacccttaatttaacgttaatttcttgtcagttcggcgaagacactgttacaatgtaatttgtaaaataaattcacataaaccatactagaattgttatatctagaagcggcaactacaattaaggagcgattgcaagtgagtgaaatcacacatcgtacaaaaacgcgtcccgtcaaagtgggacctttaacaataggcggcaacaatgaagttgtcatccaaagcatgacaacaacaaaaacacatgatgtagaagcaacggttgcggaaattaaccgtttggctgaagccggatgccaaatcgttcgggtagcatgtccggatgaacgggcggcaaacgccattgcggatattaaaaagcgcatttccattcctctcgttgttgacatacatttcgattataaacttgcgttgaaagccattgaaggcggcgcagataaaatccgaatcaaccccggcaatatcggccggcgcgaaaaagttgaagcggttgttaaagcggccaaagacaaaggcattccgatcagaatcggagtaaacgccggttcattggaaaaacggattttagaaaaatacggttatccgactgccgatggaatggtagaaagcgcacttcatcacattaaaattcttgaggatcttgattttcacgatattattgtcagcatgaaggcctctgacgtgaaccttgcaatcgaggcttatgaaaaagcagcgaaagcgtttgactacccgcttcacctcgggatcaccgagtcaggaacactgtttgccggcacagtaaagagcgcagcaggactcggcgccattttaagcaaaggcatcgggaacaccatgcgcatttcactaagcgcagaccctgtagaagaggtaaaagtagcaagggagcttctgaaatctttcggcttagcctccaatgctgccacgctcatctcatgcccgacttgcggccgtattgagattgatctaatcagcattgccaatgaagtggaagagtatatttctaagataaaagcgccgattaaagttgctgttctcggctgcgctgtaaacggacctggtgaagcgagagaagctgatatcggaatcgccggcgcacgcggtgaagggctgctgttccggaaagggaaaattgtccgtaaggttccagaggaaacgatggtagaagaactcaaaaaagaaattgacattcttgctgaggaacactacgcaaaacttgaagctgaaaaagcaaaattaaaagaagaaacacaaaaagcttgacgggaacccgtcaagcttttttgtgttagaaaaatggaataataaatattccaagcactaatgaaacgacaccgatacccattgcccaggctccaaggccttgagcacctcttcttcttgcgatatagccgacaataataccagcagctcccaataaaacaggcagtacaaacaatgaaatgatggacaaggctaaagcgatgtaccctattccccgtccttcattgacattgccgccgctgcgatcattgtcttggtcattgctgcggtcagcagcacgataaggctctgcgatttcagcagctgtttcctcaaaaaaaccgtcattgtcgcgggtaatatttgtcccttcagatccatgatcaacatagtaactgttgttatcacgcttttcgtaatcgtttgccaccttcaattcccccttctgttttattaaaggagcttttatagtttgatccattttgcctgattcatgtttgctaaacttttctgttaatgtcaattgtttatgttacacttgaagggatgaaactgaaggagtgtgggcatgttacgcttaggaatagatattgacggcacaatcacggctcaggatacattcgtcccttatttgaaccgttcgtttaatctttccatttcattaaacgatatgacggattatgatttaacaaagctgttaaacattacccaggaagaattttgggattggatgaatcaaaatgaagcgatcatatataaggaagcattgcttgcacagcatgcgaaacagtctctcgatcttctcaaagaggagcacaagcttatttatattacagcgagacggactcatttaactgatattacttatgaatggtttgacagacaaaacattcattatgaccacatcgaacttgttgggggtcatcacaaagttgaagcggtcaagaatcataacatcgacctgttttttgaggatcatcacgggaacgccatgatgattgcgaaagaagccgggataccggtgattttgttcaattccccttataatcagcttccgattgattcaaacatcatcagagtaaacaactggctagaagccgttcaatggatgaacaacaacaagcatcacttaatacgcgtcaataactgaaaaaggagcccaaaccgggcccctttttcatatatacgcattttacgcagtagtgttttcttggttttccgctgtacaatcagggcatgtgccataaatctcaaatttatgcccgctgacctgatagccatccaaatcatcacaaagcttgtccatcggacatgattcaatttcctttgttttgccgcaggcaagacaaataaaatgatggtggtgatgggtgaatgaacacttaaatcggaagagcttttcaccggacagctcagttgtttccaaaatcccaagttcttcatataaagaaagatttctgtagattgtatcaaagcttaagcctggataatcatcattcagtgcagacagtacgtttttagcggtaagatatctgtctgaatcagcaaaaagctgcagcatatcctcccgtttgtttgtatatttatatccgttttcttttaataggttcagcgcttcttggacgttcatgaagggtcccccttttcgctttgcttaagaacgtatcacatgtatgaaaaagaaaatggcagctgtctgtccagcaagccattttctttactgcagataaaattatacccataaaatgaataaaagtaaatgaaagcctagtggattgcgtttttgaattttccgcctctcgtttcatgagtattcataattgttatgaatgcattttgatcaacttcaaacacgatcgatttgagctttgtcacttccagccttgtgacaaccgcgtaaattacgtctttttcttcgtccgtatacccgcctttccccttcagcttcgttgtgccccgaccgagacggtgcaaaatcgcgtcggaaatctcatcatactgctcagacacaataatgacagcttttgtttcatcaagcccttggatcacggcatcaatcgttttcatcgcaatataataagtcatgaatgagtacatcgcttgctcaggaccgaacacaaaaactgcccaaatgaaaatgaacacattgatgaacataacgaactcacctacagaaaacgggagttttttggtcagcaaaataccgagaatttctgtaccatccattgaacctccatttcgaataacaagcccgacgccaaagccgagtaaaagacctccgaacacagtagccaaaataggctgggttgtaatggcttctacatggtgaagtgaggattcaataacggcaagcccgacaatccctataaacgtagagactagaaaggtcttaccgatatatttatatccgaagatcataaaaggaatatttaatatgacaacgaaaaaagcgaaattcagaaaggggtttgacataaagaggtggtctaaaataagagatacaccgataatcccgccatcaataaaatcattggggattaaaaataattcaatacttacagccgcagatgcagctcctaccagaatcataaagaccctgaaaataaaatgggtaaatgtttctttcttatgttgttttgttggggtcataaaatctcctttcctgcaataactattttaaatacattataaatctattttaccattaaacactgacacattttactgatttgcccatacattaagtctggaggtggaatgaccgatgattttatttcaaagaattattttgcagcggcttaatcaggctactgctgatgatttgctgaagtactcaaaacaatacggaatcagcttaacaagatcgcaggccgttgaagtagcgaacctgttatacgggaaaaatgtaaacatctttaatgagagtgaacgaatgcggctgctgaaacaagtagagacgattacatcgaaagaaacagctcaaacagttaatgaactattcaaacaatttacaagctaaaaaatgggggtgttatcccccattttttattgctgtaaaatcttttcaagcaatgtatcatcaaattgtttttctttcagcatttcaatctcaaaacggtatggcggttttttgttctttttatcttcaccgacgtatggtgtttcaagaatttttggaatgtcttttaactgctcatggtgaacaacatattgcagtgcgtcaaaacctatttcaccaaagccaatattttcatggcggtcttttctcgcacctttgacatttttgctgtcattgatatgaagcactttaatacggtcaatgccaatgattttatcgaactcatttagcactccgtcaaagtcttcgacaatgttatacccggcatcatgtgtatggcacgtgtcaaagcacactgacagctgctcattgtgtgtaacgccttcgataatctgcgcaagctcctcaaagcttctgccgcattctgatccttttccagccattgtttctaatgcaatctggacattttgattcggatcaatcacttcatttaagccttcaataatttttttgatgccggcttcagctcctgcccctacgtgagcgccaggatgaaggacaatttgcttcgctccgatggccgctgtccgttcaatttctgaacgaagaaaatcaacacccagctcaaaagtggacggatttgtcgtgttgccaatattaataatataaggcgcgtgtacgataatctcgtcaatgccgttttcttgcatatgtgcccggcctgcttctatatttaagtcttcaattttctttcggcgcgtattttgcggtgcgcctgtatagatcataaacgtattcgccccataagagactgcttcctggcttgcagccagaagcatatgttttccgctcatagagacgtgtgagcctattctcagcaacaggttcccctactttcttttcttagattggtttcttctctgttttttcttgattttctccatctcatagctcattttctttttatacccaggcttaaccttcttcggctttttcacgagacgatgagcaatttcatccgcttcattcggcgtttttttacgttttttgcggcgctgacggtcatcgccttttttccattcgcccttttcaagctctaagtactcaaattcgatgcccattttttcaagtcttactaatgcatcctcatcagtaagctcataaatggtcatcgcttgtcctgatgagccggcacgagccgttctgcccacacggtgaacatagaaatcgagatcatccggcagctcatagttgataacatggctgacacctttaatatcaatacctcttgcggcaaggtcagttgcaatgatatatgtgaattccaaatcattgatctgcttcatgacttttttccgctcacgtggtgttaatccgccgtgcagcaagccgattttcatgcctttgccagtcagatactgggcaatatggtcagccgtatttttcgtgttggcaaacacaatccccaggtatggattcagatgcgacatgatgtcaaaaaggagcttgtccttgtcacgatgtttcgaaggaatgaggatatgctcgattttcgcagcagtcacctgttttggctccacatgggcgtatttcggattttccatgtatttcttcaagaatggtttcagcttttccggtatggtcgctgagaacacaagcatttgcagatcctcaggcatgcgggaaccgatgtaatctacatctgcaaggaatcccatgtccagcattaaatccgcttcatcaataacaagagattccgctttatgaacacttaacgcctgttctttgattaagtcagcaatccgtccaggtgtaccgacaacaagatgcggctgtattttcaatttatcaattgatttttgtttatcagtgcctccgataaaacatttcgagcgaatctgacttccttcttcaccctgcgtgattttaagcgcttcctgataaatctggttggcaagctctcttgtcggagccgtaatgactacctgaacgacatccttagcaggatcgattttgtttaataaaggcagtaaataagcgtgagtctttccagtacccgtctgagactggccgatgacgctttctttttttaacactgcaggaatcagccttttctggatatcagtcggttcgtaaaaaccaaggcgatgtactgcatctataataaatggtttcaattcataaagttcaaatttcgtttctttcatttttcccagctccttaaagcggcacattatgtgtccatcatcacattatacccgattttgcttaaaaacaccacgtttgcaaggcgtttgttttattcagttatgtaaagcaaataccgcagcccatgcatattctaatagcagagagagctgaaaggaggtacaagtatgttttcaccgcagcagccaatgagaaattacccacagcccggaccgccccgccccatgccaaatcagcgaatgatgggcagaagaccgcctaatatgcgaggaccttcatttggagcacagcagcaaggttttcagcaagccggacaatttcttcctcaggcaaatgccggagcgagaaatggtgcaggtgcaggcggaggcttaaaaggaatgctgtcaaggttcctccccggcggaggaggcgctggcagcgccggggttcccggaattccaggagcaggtgcagcagcgagcggaggtgctggcctgcaaggcattcaaaatattgccaatcctgcatcattatccagtatgcttggaaatgtgcaaaaagtactcggcatggcgcagcaagtcacccctatgatccagcagtacggcccattagtccgcaatctgccagcaatgatgaagctgtacagccaattaagtaaaagtgatgatactgagacagaggccaatgaggaaagtgaaaaacaatccgtttcagaagaatcatcagaaaaagaaaaagagactgaaacaaaaacctcagatgggaacaaaaaatcaaaaccaaaaagttcttctctcccaaagaaatctaaaacaactgacaataaagaacaagaattaaaaacatctgccccgaagaaaaaggaagctgcctctcctgctccgaaaagaacatcaggcagttcaaaaccgagattatatatttaacattctttgatatcttaagtgagattggctataatgagatcagaagaatgcaagaatagagccgtttgattacggctttttatattgcctttactcacttcagtattggaggacaaccgaaaatggacgtaattaaaatttcaccgcgcggctattgctatggtgttgttgatgctatggtcattgccaaaaatgcgtcgctagataaaagcttgccaagacccatctatatactcgggatgattgttcataataaacacgtcactgatgcgtttgaagaggaagggatttttacattggacggctctaaccgtctggacatcttaaagcaggttgacaaaggaactgtcattttcactgcgcacggtgtttctcccgaagtcagaagaatcgcagaagaaaaagggttagtcgcaattgatgctacatgtccggatgtgacaaaaactcataatctaatcttagagatgaaagaaaaaggatatcacgtgatctatatcggcaaaaaagggcatccagagcctgagggagccgttggcgtagcgccggagatcgttcacttagttgaaacagaagaagatgtaaagaaccttgatatccaatctgagaagttaatcgtgacgaatcaaacaacaatgtctcaatgggatgttcacgacattatggagcttgtcaaagaaaaatatcctcatgtcgaatatcaccaagagatttgcctcgctactcaagtgcggcaggaagctgtatcagagcaggcaaaaaaagcggacttaacaatcgttgtcggagacccgaaaagcaacaattcaaataggcttgctcaagtgtcagaggaaatagccgggacaaaagcataccggatcggcgacttaagcgaattgaagctcgaatggctgaaaggcgttaataccgttgcagttacagcgggagcttcaacaccgacgccgatcacaaaagaagtcattcgctttttagagcagtttgatcacgaagatccatcaacttggacaactgaacataatataccgctcaaaaaaatacttccaaaagtaaaagcaaaaaactgaggctgtaaaagcctcagtttttttatagaaatgtaaatggatttgtatctgtttcagaaacaaagatattcacgccaaactttttatcattacacattgatgtaagttttctcgtgacgccttctttcatgattttttccgcgtaatggcccggatcaaccacatttaggccaagcatcatcgcatcatgggccacatggaagtataaatctcctgtgacgtaaacatcggctccctttcgttttgcatgatgaatatacttgtttccatctccgccaagaacagctacttttttcaccatgctgtcagcatccccaaccattctgacaccattgacgtcaagcttgtctttcacaaataaagcgaattccttgagcgtcatctcatttttaagggttccgacacggccgagccctttttcggcgggagtctgttcgacaggatagatatcgtaagcgacttcttcatatggatggctttttatcattgcattgataacagccttttcgacgcttttaggaaatacagtctcaagccttacttcatgaacaagctcaagctctcccacttcaccgataaaaggcttagctccgtccaatggcttaaagctgccgattccttcagatgaaaacgcgcaatggctgtattcaccgatatggccggcccccgcatttccgagcgcggctctgacctgctcttcatattccttcggcacgtaaactgccagctttttcagaggatccgtataagtaggtgccagcacttccgtctcactcagctctaatgcttcagcaagcaaatcattcacaccgccgtccgcaacgtctaaatttgtatgagctgcataaacagcaatatcatgcttcaaacacttttcaattaaccttccggcaggctgatctgttgaaatatgctttagcgaccggaaaattggtggatggtgtgcaataatcaagtcaacctctttttcaatcgcttcatcgataacgctctctaacacatcaagtgtaaccatcacatttttaattggtttgtttaaggtgccgatttgcaggccgattttatctccttcaaccgcataggctttcggggaaaattgttcaaacagctggatgatctgctgcccatttacacttttagccatgatcgattacctcctttaacagctccattcgatcggcgagctcctttaatttttgtttgttttgctctgtatccgccgcttggctgatctgttcataaatgctttgagtgtgctgaagctcttgtgtccactttttcaaaaagacagcatttttttcttttgccaagaaagggccaacgagcatcccggctgataaagaaataccgtcataagccgcatccctgtctcccgcttctgccaccagcacctcatagcactttccgtcctcttcaaggattacctcatctatcagcgcatatctttctttataaagccactccctgatatgaacagcatgaatattcggctgtaaaatgagccgttccttccccgttaatttgtctttgcccgcttctaaaatgtgagcgatcaaagccccgcccattccggcaatcgtaatggcatcagcttcaccttttttaatcacttccagtccgtctccctgccttacagaaatgtgcgagtttaagcctgatttttcaacctgccgctttgcagacaaaaatgggccgtctgttatttctccggcaatcgccccgctggctttatgattcagcaccgcataacaaggaaggtaggcgtggtcagagccgatatcggccatcaccgctccattcggtatgtactccgctactgtttgcaatcgtttagataattttaattcgttcacttgtcatcacaacttttctcaatcattttttcctttactatcatataaaaaatcagcccggaatccaagctgaagcaaatgattttgaaattatttcttttgatgcgggtctgcacgcagcagtcaaaaataaaaggctgtcgagaacatctcggcggcctgtgaatgtataaagagaaaaatagttcttttatttaatttttgacacccactctgccatatcatccagcttatcggccggaacaagaccggaaggcattccattaccgcctttttcgatctttgttttaatttcagcgacatctttcttatcccctacaccttttaagctaggacccgaaacaccttcataattttcaccgtggcatgcgatgcagtttgccttgtaaatttcttctggtgaagcgtttgcatctttcttttcagcagatttgctttctcctccgctcgcaatctcccgagagtcatcaagtccttttactgataaaaagaaagttagaccaattcctaaaacagcgatcagcaaaaatggaataagcgggttccatttcatttcccttccccctttttgatccttccccctatgtaaacacttctaattctaacttatttttacaaaaagtaaatggattgctatacaaaagttttttattcacactttatacaaaattgaatagaaacatgcctaaatctctaatatcctttttattctattgtataatgtattgtatacgcttacaatagaaaatatggaattagattttgaaatttttcaccacaatgttcatttgcaaatgacatcatttttcagtaaaataaaggcatattatccatatatctttttaaaaaaagaagaacggatcttcaagacccgttccatcttattcaaggaaatctttcaaacgtttacttctgctaggatgtcttagtttccgcaacgctttggcttcgatttgtcgaatacgctctctcgttactccaaatactttgccgacctcttctaatgttcttgtacggccgtcatcaagaccgaatcgaagacgcaatacattttcttcacgatcagttaacgtatcaagcacatcttccagctgctctttcaatagctcgtatgcggcgtggtcagaaggtgaagttgcttcttggtcttcaatgaaatcaccaaggtgcgagtcatcctcttcaccgatcggtgtttccagagataccggctcttgagcaatctttaagatttcgcgtactttttcaggcgttaaatccatatcttccgcaatttcttcaggtgttggttctctgcctaagtcttgcagtaattgacgctgcacacggattaatttattaatggtttcaaccatatgaacgggaatccggatcgttctcgcctgatcggcaatggcgcgtgtaatcgcctgtctgatccaccacgtagcatacgtactgaatttataacctttgcgataatcaaatttttcaacggctttcatcaggcccatgtttccttcctggatcagatcaaggaacagcataccgcgtccgacataccgttttgcgatactgacaacaagccgcaggttcgcttcagccaatctgcgtttagattcttcgtcaccttcttcaatcttttgagcgtaggcgatttcttcttttgcagaaagaaggttaacccgaccgatttcctttaaatacatacgaactgggtcattgattttaacgccaggcggtacacttaggtcattaaggtcaaattcttcttcggctttggcaagctgctgaatattaggatcttctgtttcttcattctcactaattaattcaacaccttgttcacctaaaaattcataatactcatccatttggtctgattcaatttcaaagctggacatacgctcagcaatttcttcatatgtcaaaacgccacgttttttaccagactctgttaattgctcttttacttggtcgaatgttaattctgtctcgtgggtttgtttatcagccattatggatccctccttccaaagcttgcaacgaattctataagcggtatgattcttattcggtccattcaggcgttttctatgtgaactgcctttaacaatgtgcgaataatgaaatgacaattcatgatgaggttaagcgatctatttgctcctccgcaaggaatcattgccaataaatgctcctcatcagttctccagttattttaaagatcggttcaatgtaacgatttcttgagccaaagaagcagctcttaaaaaatctttttgcctttctgcttcggctctttccgcctctttttcttttatcattgaccaatttctttgattcaacactttttttacataatctgataactcggcttcgctaagctcttgattaacctgaagcattaatatatcggacaagagctggcttatatgatcatccgtcaccctggccatcagatgctgaggcgtcagctcggctccctcttcataaaaagcataaagataagcggctaatgcccggtgctcatcaatattaaattgaaaccctacccggtcaatcacttttttgatgacgctccgatctcgaagcatgtgagcgagtaacagcctttctgcattttcatacgccggacgcaaacgtttttgccttgcttttgtcgtcagatgcgctcgccgcgttttagtttcaccgctattgtcagcaggtttgttttgcttgctgaaaacagacagctgctcagttaaagactcctgtgaaagcgaaaactctgaagcaagctgctttacatagacttcctgctctagagaccctgaaagcgtgctgatttctttcagtacgtctttaatgtaagctaggcggtcgccttcatcggacaggttctttccttttcggaaatattgcattttgaacgccattacggtgacacttgcgtcaataatgtcgtttttaaatttttccccgccgaattttttgatgtaatcatcagggtccaatccgtcaggaatcattgcaactctgactttgcagccttttttttgcagaagctccgaagcttttaaggtggcttcataaccggctttatcagagtcatagcaaagaatgatttcttcgacgtttcttctcaggatcttgacatgatcatctgtaagagacgttcccatcgtggctatgctttcctttacatccgagcttacggccgatatgacatcagcaaacccttcaaataagactgctctttcctgctttctgatatgaaggcgggccttataaaaattgtaaagcagtttgcttttatgaaagagcggggtttcaggactgttcatatacttaggctgctggctgccaagagccctgcctgagaaagcaacaacagccccgtgatgatcatggatcggaaacatgacacggtttctgaagcggtcgaaatatccgcttccgtcttcgcgtctgatcaggagacccgctttttccatttgcgcctcactaaatcccctctttacaaggaatttcgtgataaagtcccaagaatcaagagcatagccaatctgaaattcattaatcagctctttcgtaaagcccctagaaagcagataatccagtgcctcttgaccttcttttgtatttattaacaaatgatggtaaaatttcttcaggagctcatgtgcctcagccattttttgttctccagaagactctggccgggctccggaatggactgttatatcatctggaaaatcaatttggtatttgtcagcaaggtgagaaaccgactcggcaaaagaatagccttccatctgccttaaaaaagagaaaacattgccgcccgctccgcagccaaagcaatgaaaaatctgtttgtcgggcgatacggaaaacgaaggtgtgctttctccatgaaaaggacagagtccaaagtagtttcggccttgcttctttaattgaacataatcacctatgacttcaacgatatctgccgacttttgcacctgatccacaatttcatctggtatccgatttcccatcttataacactccgtcgtacattattcgatgctttagtgcaaaatcccttcatcgttcgacaggattttttgcagcagtgtaataaatcgttctcgatcttctttattcaattttttaggccctttggcatatacgccttttcttctttgtttgccggaaaaatgacggccctctagggcaaaatcaatcgtgtcttccttgtaaagacgacctctttccgacataacagagacatttctgttcaacagcagagatgctaatccgatgtcctgcgtcacaacaatatctcccggtttcacgtgatttgcgatatataaatcagcagcttctttatgaggatcaacatacttccatttttcttcattgcttctggaaagctgataatgttcaaatgaagcgacaaaaagaacttgaacttcatactcggatgctgtttgtaaaatttcatcttttaccggacaagcatcagcatcgacaaaaatcgtcttttcttgttcattaagaagagtaattctccatccctccattaaactcctgcataaaagcaagcaaaatcgcacatcctttattattgtggatgtatatgaatttgtcgaaaaatttccgggagaaattcttgacatcttacccataatagtttattcgtatcacacgatccttaaacctaaaattaatcattttatcacaattttttattataatacaaacttcacaaagatgctattgtttttcattattcccttttggcacagccaaaaacccaggatagagcgtcctgagttatatgttttttgttttgagatgatggataatatttgctgtttcctcaaccgctttatttgaaacatcaacaacctggcagccgatccgatccacaatcttttcgaaatactcgagttcctctttgattctgttgatatttgcataaatcgctttatcattaagcccgagtgattttaaacgttcttttctgatatgattcagtttatcagggctaatctttaaaccgatgcattttttcggatcaacgttaaagagttcttccggcggatcaacctccggtacaatcggaacattggcaaccttcaggcgtttgtgtgcgagatattgagacagcggtgttttagacgttcttgacacgccgatcaaaacgatatcagcttttaaaatccctcttggatcacgtccatcatcgtatttaactgcaaactcgatggcctccacttttttgaaataatcttcatcaagctggcgcacccgccccggttcgtatttcgctgttaaaccgtaggctgtttccattttatcaatcaacgggccgataatatcataatataaaacatttgctttttccgcttcggctatcaaatattctctgatttccggcaccacgagtgtaaaacagataatgccgccgtctgcctttgcaagtgaaatcacttcattgatagtgcctatatcttcaacataaggaattcttcttacatgagtatcatccgccgatccgttaaattggctgagtgctgcttttactaccaattcagccgtttcaccgacggaatccgatacaacatagatgatgcggttattcatattatccccccgttagtttgcaatcttataggatttcattttcagataaactgacaagtattttggtcatatttgtttttgtcactctgccgatcacttcaaagcctttatcggtgtctttgatgacaggcagtgcatcaatttgtttttctattaagtgctttgcaatgtccatcacataatcctcgcgtctgcacaccgtaatgttcggcatccttgtcatgatgatgtgaacagggaccgatgtaagctcctgctggccaatgctcgctctgagcaagtcttttcgtgaaagcaccccgactaaaacagcatcgcggtccaccacaaacagagtacctacatcttctaaaaacatggtgcaaatcgcatcgtacacagaaacgttttcgtgaatcactacggggatagattgaaagtctttcacctgaagctttttgagtttatccgccaaaagctgtgtgccggtttttcccgtatagaaataaccgactctcgggcgcgcctcgaggaatcctgacatggtgagtatggctaaatccgggcgcaatgtcgccctggttaggttcagcttttctgcaatatgctcccctgtaatcggcccgttttcttttacaatctgcaaaatatgttcttgccgtttatttagttcgatcgtactcaccaccttttcacttcatagctatgtaaagaaataacaatccatattataacgtaaatatcttgtaatcaaacaaaaaacttataaatggggaaaagacgattaccgatcacacagcaaccgccttttctctctttattttacaataagggcattcatattcgcaaaggacttgatctcatccgccaagcttaccatttgcgctaaacgatttgcctttaatgactcattatccgctataaccattgtatgatcgaagtaagcatcgatcggttcttttaaggctgcaagtgaagcaagcgccgcctcataatcttttttgctgaagttttcctgcagattttgcttcgctgtttggtaggcatcaaacagttttgcttcgtattcattttcaaacagatcaggctgaatgtctccgcggactccttttttgctgatagagatcactcggcctaacgcttcggctgtttccttaaagccaggtgcaccaagcttttgctccagtacttgtgctttatgcagcgcagagtacggctcaagctcagagctttccagcacggcgtcaatgacatcatgtctgatttgttcagcattcaagacatatttcaagcgctgagtgaagaaatccagcagttcattttctttatcggtttgaacgaaagtaagcagctcttcaaatgaaattccccagttgcggtcaagaagaatcgcaacaataccgcttgcttggcggcgcagtccgtaagggtcctgggaaccggtcggaattacgccgatagagaagaatgaagcgattgtgtcaagcttatccgccattgctacaacagctccggtgaaagtagaaggcgtttctccgcccgctgatctaggcatataatgttcattaactgccgcagccacagcttcatcttcgccaagcattctcgcatacttttcgcccataattccttgaagttcagggaattcatatatcatatgcgtcacaaggtcgaatttagaaatttcagcagcccgcttcacatgttttaatgtatcttcatcagcctgaagacgaacggcaagtttctctgcgattgatgtgactctcctaaccttatcagcaagagaaccaagctcttcatggaaaacgatattttcaagcttcttcacatttgcatcaatgtttagtttctgatcttctttgtagaagaatgaagcatcagataaacgtgcgcgcagcactttttcattgcctcgggccacattttcaatcgcgtggctgttgccgtttcggactgtgataaagtgaggcagcaggtcaccgtttttgtctttgacagggaagtagcgctgatgctctttcattgtcgtgacaagcacttcttcaggaattgacagaaactcggattcaaatgaaccgtaaagagctgtcgggtattctactaaatgattcacttcatcaagaaggtcttcgtcaactggaatgctccaattgttttcagcagccattgtttccagctgagattgaatcatttgctttcggacgctaggatcagcaataacatgctgtcctttgagctgctcttcataagctgaaggtgattcaattgacacttcatgtccgaggaaacggtgtccctgtgttgtccgtccagactcaacgtttgtgatcgaaaatggaatgacatcctgtccaaataatgcgacaatccatttgatcggtcggatataacgcaaatcttcatttccccagcgcatgtttttcgggaaatgcaagcttgtaattaaaccgctcaattctggcagaagcgacttcgtttcttggccggcttggaatttttgcacgaatacatactctatgccttttacttctttgatgtacaggtcttccacatttgcgccttggccttttgaaaagccgattgccgcttttgtccagttcccgtccgcatcaagggcaatttttttcgcaggcccttttgcttcttcttttatatcatcctgcttttctgcgacatccttaacgaacacagcaagacgtctcggtgtattgaagagtttcacttcaccgtgagtaatatttttttctttaagccagcctgtcagcttgtcgccaagctgaaccatgctttcattcaaaaagcgcgccggcatttcctctaatccgatctctaaaagtaaatcctgtttactcatgagaagaaccctcccctttaagcattgggaaccctagtttttctcgttcctcatagtaggtttttgctacttttctagctaaattccgcactcttgcgatatagcccgtccgctcggtaacagagatcgcacctttggcatcaagcaggttgaaagtgtgcgagcatttcagcacatagtcatatgctggatgaacaagtccgttgtccatttgcttgatcgcttctttttcatatgtgctgaacaattggaacagcatatcgacgtctgatgtttcaaacgtataaacagaatgctcatattcagccatcatgaataaatcttttactgtaaaccctgacgtccattccaagtcaaacacgttttctttatcctggatataagacgcgagacgctcaattccatacgtaatctctacagaaacgggtttacactctaatcccccgacctgctggaaatacgtaaattgtgttatttccattccgtcaagccaaacttcccagcctagacccgcgcagcctaaagacggattctcccagttgtcttcaacaaagcgaatatcgtgctcaagcggatcaattccaagagcacgcaaggaatccaaatacagctcttgaatgttatcaggtgacggtttaataatgacctggaactgatgatgctgatacagtctgttcgggttctccccgtagcggccgtctgccggacgtctggaaggctctacataagccactttccacggctcaggaccgatactgcgcaaaaatgtatacgggctcatcgtgccggctcctttttctacatcgtaagcctgcataagcacacagccctgactggaccaatgcttttgcaaggttagaatcatgtcttgaatattcatttcaagcacctccacttttctttcataagttgactgcggcagcaaccaaaaaactcccgtctctatgcttgccagccgcaaacatagggacgagagttctcccgcggttccaccctagttgctgagaacaaaatcccagcctcttttttaaaattgctcaagaatgcctttcgttgcgtgctcatccttagcttacaccgccctaaggtcgctttcatgaggtaaacgcaagtacttctttctctcactgcaacatattttataataaatgatcatataaaaagatggaccaaatgtcaacttttgttttcacccataagatgtttcatgctttccatttgatctaaaaagcgctttgattttaaatacaatcccgaatattcttcgtaatataaatcaatcacttgctttaattcagcttttgtttcctcttttaaggacacattgccgagtctcgacagatcaaaatagtaaaagagccttaacagccttgccgtttgcggtttaatcggtatcctgtaaggatctttttcaaaacagcggtggcatataaaaccattatcacgaacagagaaatgaaaggttccgtcttggcttttacaatgtacacaatgattcagctcaggatacaggcccatgacaccgagcatcttcatttgaacaatgaaggtgataacatccggatctgttccttcattcaactgttttaatgattctaatatgaattcaaataaataaggatttggctttttttcttctgtgcctctgtcgactaactcagcaacataggcagcatatgctgttaaaaacaagtcttccctgatgcctctcatgctgaggatcatttccccctgctgaagcgttccgaggcccgatgttttttgcattaagaaagaaccatacaaaaagggctggctgactgctgataaacggctgttcggttttttggcgcctcgtgccataacacctatttttccgtgttctcttgtcagtaatgttacgattttattcgtctctccgtaatcatttgtgcgaagaacgatcccttcacattttgtcagcatttccgcaccttcctcaagcaggagcggccaagaggtttataaaattggataatcaaatcgggctagctcatcttctagttcttcgggtctttccatgttctctttttccagttctttaaaaagaagatacgtatcaacatttcctgtttgagaaaatacgttccaggtaaaattcaacacaagaaacccacctttctgtagttaaactagcttacctaaactccaaattcttacctttatcttgaccagatgtcctccatttcatgttaaacaaaatttgctaatgtatccctgttcctgtgagataatgacacacacgggaagagattaatattcgtcctctttaaagccaaaatcgcgaagctgggacattttattacgccagtctttctgcactttcacccacaattcaaggtagacacgggagcccaacagtgcttcaatatccgctctcgctctttttccaacctcttttagaaggcttccttttttaccgatcacgatgcctttctgggaatcccgctcgaccacaatcgttgccgctacgtgcacagaaccgttgtcctgccctttgatggattcgatggccaccgcaatgctgtgcgggatttcttctctcgtcaaatgcagcaccttttccctgattaattcagaaatgataaatcgttcagggtggtcagttacctggtcactcggatagaattgcggcccttccggcaaatacgcttcgatctgcgcgagcaaggtttcgatgttatttccttctaaagcagaaatcggaacaatttccttaaaaggataacgtttgcggtattcgtcaattagcagaagcaattggtcgggatgaattttatcaattttgtttacgattaagaatacaggcgtagacatcgtctgcaatttctcaatgatgaattcgtcgcccttcccgtagccttcctcagcattgatcataaacaagatcaaatcgacttcttttaatgtattttgcgccactttcatcataaagtccccaagtttatgcttaggtttatgaatccctggtgtgtcaataaaaatggtttgtgatgtgcctgtcgtcagtactccttgcaccttgtttctcgtcgtttggggcttatcgctcatgatcgcgattttttgtccaatgactctgttcaaaaatgtagattttcctacgtttggtcttccaataatggatacaaatcctgatttaaagctttcgttcgtcatgtaaatcctccgatgaaaatgcgcctggcaataattcttccacagtcatttcttttatttgtccttgtaaattagtcagtacgacaataacgtcttttgtgcaaagctcagaaatcacctgtcggcaggctccgcacggagatactggtccaggggtgtcagccgcaacggccagcatctgaaactctgtatccccttcagaaacagctttaaataaagcggtacgctcggcgcaattgcacatgctgtatgccgcgttctcaatattgcagcctctgtacacttttccatccttggtaagaagagcggctcctacttggaatttggaatacggcgcatatgccatatcacgcgcttttaaagcttctgttattaattcttgtctgttcatgtgtacattcctctcttacctataatggtaccgctatcactttatattttacataatcgcgcgctttttttcacgcccatttctaaaaatgtaaaataaatgtaagaattttcagccattacagctttggcaaaaaaataagtaaaccaatgatacacgaaatcacggcaaaaacgcaaacagccccggcggcagcgtccttggccgctttagcaagagggtgatgtttgtcagttattaaatcaaccgtatgttcaatggctgtatttaaaagttcaagcgaaaacataccacctatcaaaaggaatataatcatccactcaataatgctgagctctacaaggaagccgcaaatgagaacagcgcaggcggctgcggcatgaaattggaaattccgctccgtccgcgctgtttcccatatgccccggcctgcatgcacgaagcttttgaagaatcgattcagctcatttctatgatcttttgagtccataagcgtccagcaattccttttgcttagtaaacatctcctcttcttcctctttcgtcatatggtcatatcctaaaaggtgcagaaatccgtgtacagctagaaatccgagctctcttttaaaagaatgattatactcctctgcctgctctcttgtgcgatcggcactgatgataatatcacctaaaaccggaggcatttcggcgcccacgatttcgatctcgccttctccctcttcttcaagagcaaatgagatgacatctgtcggagcatcctttccccggtattctttgttaatctgatgtatgtcatcattggaaacaatcgtgacagaaacttcagcctgatcctgaacgccttcacgctcagcggcaaattgaagcagattttctacttctttgagcatctcttctgagacgcttcccgtttcatcaacgatatcaatcagtaaactcatctatttcaccttcttagtagcctccggatattcaatccgggagtggaaaattccttttaatgttgcacagagcgtttttgcgattgtatccagctctttaaatgtcaaatcgcattcactgaactgtccgtcctgaagcttatcggatataataccccggacaagcttttcaattcgttcaggatttggattgtgcatggatctgacggccgcttcaacactgtcggccactgatataattgcggcttcctttgactgcggcttcggtcccggataacggaactcttcctctgtaatctggtcgcctttttccttcgctttatagtaaaaaaactttaaaagcgaggttccatgatgctgctcagcaatatcgacaagctctttcggaaatttatagcttctcagcatattcgcaccgtctgtcgtatgcgagataataatatttttgctcaactgaggtgacagcttgtcatgcggattgtcaatattcatttggttttcaataaaatattgcgggcgctttgtttttccgagatcgtgataatatgcgccgactcttgcaagcaaaccattagccccaaccgcttcacaggctgcctctgataaattggcaaccattacactgtgatgatatgtacctggtgtttccgtcagtattttgcgcaatagcggatggttaggattagacagctcgagcagcctcatggtggataaaatgccaaagcccgtctcaaaaaacggcatcagaccgatgatcaatacagatgaagcaaaccccgacacaacccccatgagcattaacgtgccgatttcaagacccgacagcgcagtgttctggatcaataataaggatagaacgacaaccatattaataaacgccacgaaaagtccggtctgcaaaatctttgatcttgcattgtgttttcctaaaaataatacacctgaaatgccgctgatcaaataataaatccctatgacataattgaatgttcctgtcacaccctgattaaacatcatacttccgcaaatcgcaagaatgatacttcccaaaatggcaatgcgttcattcatcagcagtttgattaagatggcgccggccgcaatggggaccagatagccgatattattatactccatcttctgaaacaaactgacaacctccatgatcacaagcaaaagtgttgtgattatggagaataacagaatggattggtttttaaacttcagattttgtttctgtttttcaaaataatatacaagtgttgcaatgaaaagtccgatcataatcaatagcccgctgatcggtttaaagagatttgagttatttaataacccggtcagctcaagtttcctgtacacttcccgatcaatgaggtcattttcttccacgagcacttgcccctgtttgatttgaacctgctggacattatctgaggcttcctgccgttttgcctctgttgctttcggatcgaagacgtaattcggaataatagcaaaacgcccgatttctgtcgcggctcccaagtatttagacggaatagaattgctctttagctctttttctaccttatcctttgcatcagatagtttatccgaagggatttcactgctcatgaccgtatttaccgcggtaatgaccgtatctctgacaaaagaaaagtcttcactgtctgctttcagcaatgtcttgatggaatcctccgatatagaatcattcacatctgatgtcaatttgtcctttacagatttgaccattgatttttccgatggtgatttactgccttcttccgatgattttttcacttcactaatactgtcgaatattgatgacacaaggtcaatccgattgtctgtatattctttttttaatgtatattgatcttcaaccgcgtcctcagcggcttgctttttttcctctgtggctttttgatcttctacggttgccggagcgtaaatggtcttgtcgctgactgaaaacaggtctaaatcaagtgtttccggcttaacatgtacaaagagcaaagcaaacataatggcagccagcagaagatacagcagtacatgcatggagcgggcatttttaaaactgctccatttttttgagctgcttttggtcttagccttctttttcaacacaagaacctcctcttgaaacatcaagcccataagcaatcataaaaatgacccgataacgcgcgatcgggtcattcagcattaattttgcttatcgtatgcttcaataattttcgcaacaagcggatgtctgaccacgtctgtctggtctagctcaatcatagaaatgccgtctattcctttcagcatctccttcgctactgcaagtcccgatttgacgcctttcggcagatcaatttggctaacgtcacctgtaatgatcattttagagccaaaacccagtctcgtcaaaaacattttcatttgagcaggcgtggtattctgtgcttcatcaagtataacataagcatcatcgagcgtccgtcccctcatatatgcgagcggagcaatttcaatgatgcctctttccatcagacgttctgtatgatctgccccaagcacatcatggagagcgtcatacagcgggcgcaaataaggatctactttttcttttaggtcacctgggagaaaaccaaggctttcaccggcttccacggcaggtcttgttaaaatgatttttttgatatgtccgttttttaaagcatggactgcttttacgacagccaggtacgttttcccggttcccgccggaccaatgccgaatacaaggtcattccgcttcatagcggccacgtattcccgctgtcccattgtttttacacggattgatttgccttttgcgttttttgtaatttcttcttcatacatgctttcaaagtattcaagttcattcttctttgccattttgatggcgtaaatcacatcacgttcagagatctctatccccttgcgaattaaagcgaggagcgatcccagcagcctgtctgcaatctgaaacgattcatcatcgcctgaaacataaatcgtctcgccgcgcgtaatgatatttaaattcagatctttctccatcaatttcaaaaaagaatcttggttcccgaagagtgaaagcgcctcgtccgggtttttcagtttttgattcatcgcaagtaaatgttctgtcattcttcagtctccctgacaataggtgtggtttgaacgatatcttctataacttggtagagaataatcaactttactttaccattctcaacagtctggtgcaaaactttttcacttttcacctcgccgttttcgcctattttatcctctacatcctgtttacccaatttaatgccttcttgaactgcttcttcttttgtatattttcgcaaagcctcttcactttctctcgtttgctctttgacataggatacagggagcttaaatccgagaaaatgaagcgaatgcttttcttgttctgtttttggatgcttcaattcctcttttttaaacgtcatcccccagatcgggattgccaaagaaccaaaagaaagcttgtgctttgtccttactttgcccgtatagacgttaaataatgtttcaagcgggactgtcacttctgatctataccaggtttctccataaatttctgcttttgaggcgacttcctgctgatggtcttcgctgccgatcagtcccgaaacaagcagctgtcccttttcaacatgatcgtgtatggcggccatgggctgtcctttttgcacaaacattctcgtaatggttgctttctttttggcgacaatattgcgcgggctaacatatttttctttttcgggctcatttttctccacaactttcatatgaatggtcgtccccttcagatcaactccgacccaagtgatattgtctattccattggttaatgatttctgtattttttcgggcgacatcattaaaaactgcagacggccctttttgacgccgatttcattaagatgctgcctcatttgatgttctgtttcaggcttagcgcctgtcacatcaattttccacaccatattggacagcaaaaacaaaagaatgaaaaaaatcgcaaaaccgatcgtaaaccctatattcagctttgatttcagcaacaggaagggaaatcccttccgattgataaatcgggctttacatttaaatttacttcttacccgccgaaaggcatgtacatcctgaagctgtatatataacgatacggcttctttcttttttttgacatgaaagaccggaatcccctgtcttgtgcattcattaaggagccgctcaatccctcttcccgtcaattcaagctggaccttacccgaaaaaaaagacagccatttatttttcacaacatttccccctcggctttatgactcaacatatcgaacgacatcaatcgtaccctccaaaagtatctcttccggaagaatcgccttgatgacaaaatttttaccagatatgatgcactggccctgcttcagcatcagccgcacttcattctcactgaaaagcaaaaggcctctgtggttttctatgtagatatgaagtctgccaaccattgtaatcctcggcagatccatcataacgtccgggggaatttccaatgctcttgtcagccaagctttcatacgattctttctttgccccatacaaaaagaaccccctttcatctcatatgtatgatttgaaaggaggttctaacactttaatttttacgggccgggcgcatcgtacggtgaggttttttcgcccgtggaggtccgaacacctctcctagaacgatcccctgtacgacggtgtctttattcacctgaagcattttttgttttgtgtatactgttttttgtttggcagcagcaagatctcgttccagccctttcaggtttcttgctgtttccctgcgtctttcttccgcttcccgtcttgcctgttccatacggttagggataggtgcaggggcatcttcttttgactgcttcttttgaggagaagcagattgcacgtgttgaggtttttttcttttttggctgttttgcttttcttctttgctctttttgccgaaaatcgcagaaatgattccgatgatcgctgcaataataagcggattggtcagtaaatcttccatcagcgttctcccttcttagagagattatgatttgcggtcttcatccgaagggtctttcgtcagcttgccgaatgaatcacgcatttctgtgtcagcatcgatgttcttgatattcatgtaatccatgacgccaatattcccttcacgcaaagcttctgccatcgcaagcggcacttccgcctcggcttctactactttcgcgcgcatttcttctacgcgggcacgcatttcctgttcttgagcgacagccatcgcacgtcgttcttccgcttttgcctgcgcgatgtttttatcagcctcggcctgatcggtttgtaaaattgccccgatgtttttgccgatatctacatctgcaatatcaattgagagaatttcaaacgcagttcctgagtccaatccttttccaaggactgtctgagaaatcatgtcagggttttcaagcacttttttatgattatcagatgaaccgattgtagaaacgattccctcacctacacgagctacaatggtttcttcccctgctcccccgacgaggcgctcgatattcgctcttactgtgattctcgctttcgctttcacttcaatcccgtccattgcgacgccggcaatgaacggtgtttcaatcaccttaggattaacgctcatttgaacagcttccaacacgtcccggcctgcaagatcaatggcagcacagcgctcgaatgtgagttcaatgttagctcgctgagcggcgataagcgcgttgacgactctgtcaacattacctccagccagatagtggctttcaagctggtttgttccaacattaagtcccgctttatgcgctttaatcagcgggttaacaacccgattcggaatgacgcggcgaagcctcatcccaactagagtgaaaatgctgattttcactccggctgccaaagctgaaatccaaagcattacaggcacaaatgtaaaaaatactgccaaaacaatgatcgctactgcgacaattgccagaatcataagtgttgacggatccatataacttctcctcgtttctatttaaatttctctcacgacaatgcgtgagccttctacttttatcacttttacttttttatctttttctgtaaacgatccctccgatacaacgtcaaggcgttcatcatcaataatcacggtaccggaaggacgcagcggtgtaaaggttatacccacttttcccattaagtccgtgcgcgtttgatttgaaacgtagccgctctccgtgtttgtagaatcatttaatatcaatttcttaaagaatttcatacgctttcccaacacccttgtcagtaaaataaaagctgtaatcgaaacagctgaggcgatcaagagagaaaccgccatgacagtgaagctccccgcggctaaaaacaggctcgcaataatcgctcccaagcccagtaatccaatgattcctccgggaagaaaaatctcaagcagaatgagaatcacccctgctataaagaggagaaccgtctcatacccggcaaggccggctgcaagatgcccgtaaaagaacagcaataacgcaatgagtccagccgttccagggaggccgacacccggggaaaaaagctctaccgtcagacctaaaaaagcgattgtcagcagaatagggacaatgaccggattcgtcagccatcttgccgtcttttccgcaaagctctcctttgcatagctgatctgcgccttttcgaacccaagcttctttacgagcgtggacaaattgtcagcagtgccttctgaatagcctacctcaatcgccttgtctgcgttaagtgtcagcagatctcccttaggcgcgccaacttccttggcatctatatctgggtcagccattgcgagcgcatattttggatcgcggttatttttcactgcggcatcttccatctctgccagccaaagtgattgagctttttggtcagcggcattgccttggccatcaacaatcgcggcggctcccatttttccgccaggcgccatataaatgtgatctgcttgaagtgcaatatatgcaccagcagacaacgcgcgtttgttgacatatgcagttacggggatctcgctttcggttatcaaatcggccatatcaatagcagatttgaccaatccccccggggtattgatatcaagaataatatggtctgcatgtgcatcctttgcgtcttgtaacgaacgggacaaaaacgaggcgagaccctgttcgacatttttttcaaccgggatcacataaacagtttgtttttctgcttttgcgttcagctgtacgcctaataaagaaagtaaaaatatacccaaaagagcagcacggaatcctttgatttgaagcaagggcggtgtatccctccttccttttataataagtgccttctcttcatacgtaacaaatgtatcaaaggtttcatttttttatgtataaaaaaagacatctctcttagaaagatgtccttttctttgccatttaagacagttgactgctcacaagcttattaattaaacttccgtcagctttaccttttactttaggcataattgcccccatcactttgcccatgtccgcttttgagctcgcaccgacctccgcgatggtttcatttacgattgtacgcagctcttcttctgacagctgctcaggtaaataaacttctaaaatgtccagctctttttgaactttatctactaaatctaaacgattagcgtttgaaaattcctggagggagtctttacgttgcttaagttcacgagaaaggacagtgagttcctcatcctcggtcaaactgtctttcttaagcttaattgcttcattttgaagtgaagccttaaccattcgaacgacagtcagtttgtctttctcacggtttttcatatacagcttcatatcctggttgagacgctcaagaagactcataaatccaccctcttttagaatttgcgttttctagcagcttcagactttttcttgcgctttacgctaggtttttcataaaattcacgctttcttgcttcttgcaaagtacctgtctttgatacactgcgtttgaagcgacgaagagcatcttcaagcgattcgttttttctaacgaccgtttttgacattctctttccctccctccgaatacaccaatcgactacctttaagttacacatataaacatgtactttgacattataatataagccatcagtcaggtcaactaagtgagttcacttttccgtcatgagtgcgactgcctgtctatataatgaaagaaaggggttggtgaataggatgttaattctgattagctttactgctcttatattattctttctcgcaggcatgaacatgcttcgaaagggcttaatttcaatggcgtactcaaaaattgaagaacgtttgcttttatttacagaccatccgttaaaagcgtttcttatcagtattgtatttacggggatacttcagagcagctcagcctttatggtcattgtcatcggctttgtaagtgcgggcgttctttcttttaagcggacgatcccgatgattctggggacaaatgttggctctacttttacaactgaatttattgctatcaaaatggatattgtgatttgggttcttttaataggaggtttattgttttttctgactggcaggtatcctttgaaacagctgggaacaagcttccttggactgggcatcatcttcttttgcatcagcggattcagccatcttgccgggccgctgacaaagctgaaaacgggcgccgacgttctataccatgttaacgattcaaactggtccgctttgctcatcggcatggtgttaactgccatcattcactccagttctgtctgtatcggcattttgatgagttttatgaatgaagggattatcggactgacacaggcgatgagcgtcgtactcggatcaaatatcgggacatgcattacagctgtcatggctgctgtatccggcggatatgcggcgaaacagacagcatatgcccatgtggtatttaacgtgctaggggtggctctagtattgccttttctgaccgcagcgaccggctttgtagagcagttatcacctgatcccgcacaaaagatcgcgcatttcagccttttatttaatgtggtgacagctcttttatttcttccgcttacaaacttgttttaccgattgattcaccttcttatcccggctaaataaaaaaatcggtacattttaatgcaccgattttttaggttaagaagacaaacgcatgtgttcagttatttcatcctcaaccacacggacaaactgtccttcgttgtaaggataacctgcttttaggattttgacttttacgattttgccgatcatatcttccgtacctttgaaaacaaccttcatataattgtctgtgtaaccgacaaacatattttcttcttctgtttccttaaacgcttcctcagggataatctcaagcacttcattttcatactgagaagcgtattcttttgcaagctggtcagaaagagcaatcaggcggtgcacacgttcgtttttcacgttttcatccacttggtcttccattcgtgcagctggtgttcctgtacgcttactgtaagggaaaacatgcagctcagagaatttatgttctttaataaagttataggtttccataaattcttcttctgtttctccagggaacccgacgatgacatcagaagtaacagctaagcctggcagtgcttttttcaatttatttaaacggtctgcaaagaattccattgtatatttgcgtctcatccgtttaagcactgtgtttgatccggattggataggaatatgcaaatgattcactatcttatctgagcggtctaagacctcgatcacttcgtcagtgatttggctggcttcgattgaagaaattctgatccgtttcacgccttccacacgggtgtctaattcgctcaaaagcttcgcgaagttgtaatctttcatatcttcgccgtagccgcctgtatgaatacccgtaagaacaatttccttatatccggcatcgacaagctgctgcgcttgtttaatgacttcttcagggtcgcgggagcggagcaggcctctcgcccacggaatgatacagaatgtgcagaaattattgcagccctcctgtattttcaatgacgctcttgtgcggtccgtgaaagcaggcacatcaagctcttcatatactcttgctttcatgatgttgctgacgccattaatcggctggcgttcttctcggtattggtcaatgtagccaagcattttttcacggtcctgtgttccgactacaatgtcgacaccggggatcgccataatctcagcaggtgaggtttgcgcgtagcagcctgtgacacagatgacaccgtcaggattttgacgaatggcgcgtctgatcacttggcggctttttttatctcccgtatttgtaaccgtacatgtattaatgacatatacatcagctgtttgttcaaagtctcttctttcatagcccgcttctttgaaaagctgccagattgcttctgtttcataatggttgactttacagccaagcgtatggaaagcaacagttgccattactgatcacctcttaataactctgtttgataagaaatcgcactcaacgcgtatagcggagcggtttctgtccttaaaattctcggtccaaggccgcacgtcacaccgtcttgctctgtgagccgttcaacctccgcttctgttaaaccgccttcgggaccaaatacgatcaatagagatgatcctttcggaaggctgcttacaatcgcgctgaatgcgcttatttccccttgcttcgatgactcctcgtatgcaacgacacatttatcgaaatcctgcatcctttgaagaagctgctgaaaagaatggacatccatcactcgcggcacttcgttacggtacgattgctcagccgcttccttcgcaattttcgtccatctttcccgctttttctttgcctttttgtcatccagcttgacaacagaacgcgcggcttggaaaggaataaaggcatgagctccgagctcagtccccttttggataatccattcaagcttatctcctttcggaaggccgctcgcaatatagacctttatcggaagctctctgttttcattcgtccattctatcacaaggcaggacactttatctttggaaacagattgaagttcacattttgcctcgaagccgtcttgagagcagcagataatctgatctccctcattcattctcatcacgttcacaatatgatgaacttcttcgccggtaatcgaaaaagtcggcgcttcctctatttgctgcttcgtgagctcgataaaatatcgttgcatacgctgtgacacctactaactgttattttttcgcaataatgctgacccaatcttccattgaaaggatttctacaatggtaaagccagcttgttccagtgcttcttttacttcttgttttttatgaccgatgattcctgacgtaataaagtgaccgccttcttttaacaggctgtacgcttgtgaagtaaagcgaagaatgacttcagccaaaatgttggccacaatcacatcatgttccccttcaatcccgtctaacaaattgttttgcttcacttgagcaatatcgctgactttgttcagcttgagattgaggcgtgcactttctacagccacgggatcaagatcgtaggcatgaaccgattcagcctcaagcattgcagccgcaatacttaaaattcccgaaccagtgccgacatcaatcaccttatcacccttttgcacaaagcgttcaagcgcctgaatgcagagtacggttgtcggatgtgtccctgtgccgaaagccattcccgggtccatttcaataatcagttcatcagtatggaccggcgtatattcctcccacgtcggcacaattgtaaacttttcagaaattttcacaggatgataatactttttccaggcagtcgcccactcttcttcatttacttcagaaatagtgatgtggtttctgcccaaatcaatattgtaaagaaggagattattaatcgtttctttgatgccgtctacagtttcgcccagaaaactgttaaccggcagatatgctttgacaatgacaccctcatctgggtaatcattggggtcgagctggtagatttccccgtacacattctcacgttctttaattaaatcaagcgggtcctctatcacaaccccacttgcaccagcttcatgcaatatatttgagataggttcgaccgcttcatgtgttgtgtgaatgcttaattcggaccatttcaaaactaccaactcctcatccaataattaatcgcctttaaacgcgcgttttaccttgtcaaagaaactcatttcctgttcgtcaggcaggtttccgctgacttcggcaaattcgcggataatgtctttttgtttatcagtcagatttgtcggcgtaacgacgcggacgacgatatgctggtcaccctgtccatagcctctgacattttgaacgcctttgcctcttaatctgaatttcgttcctgtttgtgtaccggccggaattttcaatttcacttttccatgcagcgtcggcacttctacctcatctccaagagcagcctgagcaaacgttaacggcatttcacagtaaatatcatcgccgtcacgctcgaagaactcgtgtgcgcgtacatggaacacgacaaataaatccccggcagggccgccgtttattcctggttcaccctgtcccgagagacgaagctgctgcccgtcatctacaccggctggaattgtcacattgattttcttgcgttttttgatttttcctttgccgccgcagtccgcacatttgtttttaatgattttgcctgtaccttcacagtggtggcagacccgtctgttaacgacttttccaaacggtgtattttgctccacgtttaactggccggagcctccgcagtgggagcatgtttctggatttgttccaggtttcgcacctgagcctttacatgtttcgcacgtttcctcgcggggaatttcgatggttgtttctttaccgaaagccgcatcctcaaacgacagggtcatcgtatactgtaaatcagcaccctggcgcggagcgtttggatctcttcgtcttgtgcctccgccgaatatacttgagaaaatatcatcgaaaccaaaaccgccgaaatcgccgccgccaaaacctccgccgccgaagccttggttagggtcagtgtgaccaaattgatcgtaatgcgcacgtttttggtcatctgacagcgtttcgtatgcttcttttacctctttaaatttttcatctgatccggcttctttgttaatatcaggatgatatttttttgacagcttccgataagcttttttaatttcatcctttgaagcgctcttacttactcccagcacttcatagtaatcacgcttactcatctcgcttcactctcccgaatttctcacataaattagattgtatcattttgaattatgatttttcaattccttttatcccgggcaagaaaaaaagtcaaagccaagagatgcctgactttgactttctaatcattgaatcagattatgaaatgtgttcttttcggtcagctccggaagcggggctgacactaaaaagaacttattttttgttttggtcgtcgtttacttcttcgtattcagcgtcgacaacgttgtcatccgctttgccttcagcgtttgctccgccttgagcttgctgtgctttagcagcttcttcataaagcttcatagaaagctcttgaacgattgtttgaagctcatcttttttcgctttgatctcttcaaattcgtttttctcaatcgctgcttttaaagcgtctttggcatcgttggcttttttcacttgttcttcgtccactttgccttcaagatcttttaatgttttctcagtttggaaaacaagctgatctgcttcgttgcggacttcgatttcttcttttttcttcgcatcagcgtcagcattttcttccgcttcttttaccatgcgttcgatctcttcatctgagagacctgaagaagatttgattgtaatgttttgttcttttcctgtgcctaagtcttttgctcttacgtttacgataccgtttttgtcaatatcgaaagaaacttcgatttgaggcacgccgcgcggtgctggcgggatatcagtaagctggaagcggccgagtgttttgttgtcggcagacattgggcgctcaccttgaagaacatggatatcaacagctgtttggttatcagcagcagttgagaacacttgagatttgcttgttgggatcgtcgtgttgcggtcgatcagttttgtaaacacaccgcccattgtttcgataccgagagaaagcggtgtaacgtcaagaagaacaacatcttttacgtcacctgtgataacgccgccctgaatcgcagcaccaagcgctacaacttcatccgggtttacgcctttatgcgcttcttttccagtttcttttttgattgcttcttgtacggcagggatacgagttgatccgccgacaaggatgactttgtcgatttcgcttgcagaaagtcctgcatcttgaagcgcttgacggacaggacccattgtgcgctctactaaatgagaagaaagctcttcgaatttagcgcgagttaatgtaagttcaaggtgaagcggtcctgcttctccagctgtgataaacggtaaagaaatttgcgtagaagatacgccggaaagatcttttttcgctttttcagctgcgtctttcaaacgctgaagcgccattttgtcttttgacaaatcaatgccgttttcttttttgaattcagacaccagatgatcgatgataacttggtcaaaatcgtccccacccagacggttgtcgccggcagttgaacgaacttcgaatacaccgtcgccaagctcaaggatggaaacgtcgaatgtaccgccgccaaggtcgtatactaggatcgtttgatcttcatctgttttatcaagtccgtatgcaagcgctgctgcagtcggctcgttgatgatacgttctacttcaagacctgcaattttaccagcgtcttttgttgcttgacgctcagcatcgttaaagtatgcaggaactgtgataactgcttttgatactgtttcgccaagatagctttcagcgtatgatttaaggtgttgaaggatgatagcagacacttcttgtggagtgtaatcctttccttcaatttcaactttataatcagtacccatatgacgtttgatagacataattgtgttagggtttgtaatagattggcgtttagccacttcccctacttgacgttcgccgtttttaaatgcaacaactgatggcgttgtgcggtttccttcagcgttagcaataactttaggctcgccgccttcaagcactgccacacatgagtttgttgttcctaagtcgattccgataactttactcacttgaataacctcctgctatgtaattattgattcactttgaccatggaagggcgaatgacgcgatccttcagcttatagcctttttgcatttcctcaacaacaatgttggagccgtagttttcgtcttcagcctgcataacagcttggtgcagattaggatcaaattcctgccctacagcttcgatggcttcgacgccttcttttttcaaggcttctacgagctgacggtggaccatttccattccctggagcaaacttttcgtctgttcattgtcggcttcaacctgaagcgctcgttcaaaactgtcaagagccggcagcaaatcagtcacgatattttgagaacggtatttttgggacgcttccatctctaaacggctgcgtcgtttatagttttcaaagtctgcttgaacacgcaaaagtttgttttctttttcctcaagcaaaccttgcaattcgttaatttggttttgaagaagttcgctttcatttgtttcttcctgctgttcatcagcggcagcttgttcttcaatgatttcttgctcttctgtttcgttttgttcaacggtttgtttttcttctgacattgtgttcacctccctcaaagtgtaaggagaaggacaggtgctgcccttcgataaaatttgccaaaattcccttattcatcatacagacttgttaatgcttttgacaagtccgaagtcacatgctgaagcaggctgacaaccctggaataattcatgcgggtcgggccgataatcgcaattgagccgatctgcttctggtctacggaataagaagccgtaatcagactgcaattttccatctcttcatagtcgttttcttttccgattttaatcgaaattcccgtgtgcggggattgaaccagctttaaaacatcctgttctttctcaattaatgaaagcagcgaccgaactcgggtgatatcatggaactcaggctggttcagcatattgattttcccgccaaaaaacaacttttcaacgtgatttgtggaatgaaaggttgaacgaagcgcgtcgagtatattgtcatagtttttaatgtgctgtcttaggtacatgacaacttctttaaatatgcgctcattcagttcatccattggaacgccgcttaaacggtcgttcagtatatttaccagtttttcaatatcagacagatccattttggtcggaaagttaatcgttttgttttccacatgccccgtattggtaacgagaatcgctaccgccatatcaggctgaatcggaatgatttgaatctgtttaaggtaattctcactcaacttcggcccgagtacgatggatgtgtaattcgtcagatcggacaaaatttgcgctgatttttgaactgtcttctccagctcgaaaattttctctttgaagatcgagtggatttggtccaggtcgcttttcgtcaatttgacgggtgacagcaaatggtcaacatagtaccgataccctttttctgacggaacacgtcctgaggatgaatgggttttttcaataaagcccaattcctccaagtcagccatctcgtttcttattgttgcagagctaaatgtgatttcatcttttttcgaaagagttcttgatcccaccggctgtgccgatttaataaaatcgttgattataacctgaaggatcagcagctgacgatttgttaacatcatcatcacctctgttagcactctcaataagcgagtgctaattctataacaaaagtatcaaaccacaagaaaaatgtcaattataactcacccaaaaaagcgccaaaaacttcattgcctaataatttcccttgatgagtcaaataaacggcagactccgaattgtgaatcagccctttttcagcgaggtcttttaacacgcttgggaaaagtccatccagggaacggccgtatttttctgcgaatcgttttttgctgacaccggctgtttttctcaaacctaaaaacatttcttcctcaatctgttcttctgttgtcacttcatgtgtatctctgtacggaaaacccttttcagctatcaggtcaatgtaatgcttaacaggtccgacgttcactgttcgtgtgccgccaatatatccgtgagcgccagctccgaaaccgaaatattgttcgttgctccaatacgttagattgtgcttagattccatgcctgccttagcaaagttgctgatttcatattgatgaatgccgtgagcttccatcttgctcatcactatttcatacatttcagcttcctgctcctgcggcggaagatgaagccgccctttttgcatcaaattataaaataccgttttcggttctacaataagggagtaaacggaataatgctcagcgtccaatgataaagcagtgtttatggaatgttccagatgcttgagggtttgccccggaagcccgaacatgagatcaagactgatattctcaaaaccgatttcccgcgctctttcaaaagaggtgaatacatctttttgcttgtgcactcggccgattttttctaacagatcgtcttcgaacgtttgcacaccaaagctaaggcgatttacgcctgcttcttttaatatttttaatttctctgcggacaaatcgtccggattcgcttcaaccgcaaattccgataagtcgcttgagggctttagcacgcggttgatcatatccatcagctttttaagctgttcctcagacagggaggtcggcgtgcctcctccgataaagattgttttgagatcaggctgcccggtttttgctattgtatttatcatttcctgttcgagtgcgtttaaatactcgtcgactggctgactttgaataaaatatttattgaaatcgcagtagtggcaaatatgctcacaaaatgggatatggatataagctgatttcaacggattcaccttctttacagaaagaagccgcagtacaagactgcggcggcttctattgttttttcggactgtcgtccattttcagaactgccataaatgcttcttgcggcacttcaactgagccgacctgcttcatacggcgctttccttctttttgtttttcaagaagtttccgtttacgcgagatgtcccctccgtaacatttagccaatacgtttttacgcattgcttttatggtggagcgggccacgattttctggccgattgcggcttgtaccggaacttcaaactgctggcgcggaatgagttctttcagtttttcaacgatcacttttccccgttcatatgcgtaatcacgatgcacgataaaggaaagggcatcgattttttcaccattcagcataatgtccattttcacaagcttggacggtttgtagccgatcagttcataatcaaaggacgcatagcctttagtgcttgatttcagctgatcaaaaaactcatatacgatttccgctaatggcatatcataaatgatgctgacacggtttgcgtctaaatactgcatatcaatgaaattgccgcgttttccttggcaaagctccattacagcgccgacatagtcattcggcaccatcatcgtcgcttttacgtatggctcctcaaccctttcgatcttttgaggatccggcatgttggacgggttgtcgacaacgaccttttcgccgtctgtcatatacacgtcatagataacgcttggcgctgtcgtaatcaggtcgatgttgaactcacgctcaattcgctcctgaatgatctccatgtgaagcatgcctaaaaatccgcagcggaacccgaatccaagcgcttgcgaagtttccgcttcatattgaagggaggaatcattcagctcaagcttttcaagagcttcccttaaatcattatacttcgctgtatcaatcggatacaaaccacagtacaccatcgggtttagcttgcggtatcccggcagcgcttcttctgcaggattggcagcgctcgttattgtatcaccgacacgtgtgtcaccaacatttttgattgaggcagtcaggaagcctacatcaccgaccgtcagttcatttgtcggagttgctttcggcgtgaacacgcccacctctgttacttcgaattctttgccggttgccatcattttgattttttgtcccggctttaccgttccttcaacgactctgatataagccacgacaccgcggtaggcgtcataaagcgagtcgaagatcagcgctttgagcggcgcctccggatctccggtcggagctggcaccttttctacgatttgttctaaaatctcctcaatcccgataccggcttttgctgaagcaagcacggcttctgatgcgtcaaggccgataacgtcttctacctcttggcgcacacgttcgggctcggcgctcggaaggtcgattttattgatgaccggaaggatttcaagatcgttgtcaagcgctaagtagacattggcgagcgtctgcgcttcaatcccctgggctgcatccacgacaagaatcgctccctcgcaggcagcaaggcttcgggatacttcatacgtgaagtcgacgtgtcccggcgtatcgattagatgaaagatatattcttctccgtcttttgctttatatttaagctgaacagagtttaatttaatggttatgccccgctcacgttcaagatccatagaatcgagcaattgttctttcatttctcgttgagtgattgccgacgttttttctaaaatacgatccgctaaggtcgattttccgtggtcaatatgggcaatgatagagaaattccgtattctcgattgcctctctaaacgcttttctttatctgtcacaatctatcactcctactattaaacgcaaaatacactagcttagattatatcaataggattgtaaagattcaatgtaaaacaagaaagagaaaagttccctatcatatctgggttgcttttctctttcacgtacttattgattcatatcccgtatccattcatacattgactgggcagtattggttacggtgtccgaaagcgcttttccggcttttgaaaacatattgaatgtctccaccttttccagctctttttgtttttctactaaatcttttgccgtgactgtttctcctaggattgaggcttctttttcattatcttttccgtcggtgagcgtaaacgcccccttcagtgaagggtcatgatagcctttcatactcagcatcccgtggtttgcctgctgcatgccgaacagaacgcctaaaaacatgatcgtgacaagcagtaagcactttccaaagtatgcaatcaaatcaaccacctatttcttattgttttttcgtctccccgctcgctgcgttgaccttttcagcatcccagtacatttcgctgaatacgtccgcggccgcgttagccgcacgctgcagctcttcgagattattatccactccgccaaactcgagcaaaagcgctctatcggttaaatcctgattgtaaacaccattatcgcctggcgagcctttggaaaagacacctgtgctaagtccggggtattttttctccatcagtttatgaagctcactcgcaattttatagttttcttcgaagtttttgctttttttcccgacgacaaaggctaccctggcatagcttttccctttaatcgttgcggttgtgtcttttttgcgccgagagtctctgtggatgtcaatgatatattgcagatttttgtttgaagcgagggcgtctttcacgaccggccttgattcatcataggacctggcatagtttaagccttttttattcaattttgactgtatatcggttttattcactgtggctccgattccctgggattcaagcgcttgtccgaacatatctcctacaagcgtgacattggctttagaatggcgcgccatgtcaggatcggtctcgccttttaatagagggagatatgattccgtattgtgcgtgtgatagataaacacgacctttttatcacctgttgtttgtttcggcggatctttttgcgcattatctgattgcgtttgctgtttttcaatctctgccaaattcgcttctctttcttcctccatcaccttagacggcggcggcgattccgcaggcatattcgtataatccgttccttgtccagctaacaaaatctcggtatcaaattgtgcaaatcctggcagctcccgaccgagaaagctccgcggatcttcgaggttaatgctcgtcgccagctttaaagaaagacgagaaagatgaaatgagctgtctgtttgagagaggtcagaagcgaaataatggttttccatctgcagcaaatgtgcaaatacgtcacccggcaattcttcagcaatcccataaaaagagtcagacgacggcctaagttccggccggagagacgtcagcacaccggatagaacaaaaatcacgataaggcttacgataaatagaaagatggcttttaccgctttccctccatttaccgcaacaacaatctgtctgtttctgcgtttatttctcattgaatccctccagcgcttgtctagtaattactctatgaacaagctagaggaagtagaactgtttagtgattgtaggagcctttgttttcttgtgacactttttcatgaagcgctgtgtttaatccgttcgctaaaacatttgccatatcgtcgataaatgaatcgacttccttcggtgtaaccattaagttgtgccctaaaggcgaaagcacctcgtgaatgagctgccgtttttcatcttcttgaagggttccgacaatacctaggaacgattggcgctgcttttgatcgggaagatcgtcttcagtgagcactttctttttcccaaacgtcatgcctgccggaacaagcgatcttgatggcctgttatccttcatttctctgccaaaatgttttaatatgtagtccaccgtgtcgctggcaattgtcacggcatcaactactgtcggaacaccgatagcaatcaccggaacaccaagcgtgtctttgcttaaatcttttcgtttattccccactccagaccccgggtgaatgcctgtatccgatatttgaatggttgtgttgaccctttccaccgcccgcgccgccaacgcatcaatggcgatgacaaaatcaggcttcgattgctcaatcacacctttaataatgtcacttgtttcgattcctgttatccccattacacccggtgcaaaagcactgacaggcctgtaaccctcctgtacgttttccggctgaagcttaaacaagtgccttgttaccaacagattttctactgccatcggtccaagcgcatcaggtgtcacgttccagttgccgagcccaacgatcaaacagctcgcatcttttgagatattaaggttttcaagaaaagctgagaattcctccgcaaagacagcagagaccttctcctgcatttccgaatcattctccctgattccctgtgcttcaagcgttaaatagcgcccttctttttttcccgaaagctctgcgccttcctttgtaacatcaactgtgcggattttaatgccgccgtgatcacgctctttttcaataaagcctttaatttcttttgtcggcacagcctgctgattggccattgcttccttcgtttccactgccaaatcggtccgtatcaaatactgattcacatccagctcactctttttcatacaggggcctccttcacattaagtacctatattgttgccatttgctgaataaatcatgctaaaaagagaaccttcaatgaaaaatactttacatttatattgcaatctaaaggtgtgtttgatagaatacaatttgttctattgtgaagaagatttaaccttaagacactgtgctacaggttgtatcttaggaggtgaaacacatgccaaacattaaatcagcgattaaacgtacaaaaacaaacaacgaacgccgcgttcataacgcgacaatcaaatctgctatgcgtactgcaatcaaacaagttgaagcttctgttgccaacaacgaagctgacaaagcgaaaactgctcttactgaagcagctaaacgtattgataaagcagtgaaaacaggtcttgtacacaaaaataccgcagctcgatacaaatcaagactagcgaaaaaagtgaacggactttctgcataatataaaaacgatcctcaataatggggatcgtttttttcatttctttttaacagctgtaaaaggaacagttcgagcaggagctgcttgtcctttttcccggttttcatctcatagtccatgacggcaagctgttcaataattaaacggagctcctcctctgaaaaaagccttgcttgatccatcgccagctttacccgaaatgggtgaacttttagattagaagcgatttgtttttgtccgtatccctgttccgcgaagtacttcgtctgcagaatcagccggaactgattcgaaataagcgccataattttgatcggttcttcattttgttttagcaaatcataaaaaatttgcagactctctgttcgttttcggttgacgattttattgatcagctcaaaaatattttgttcaaggcttctagcaacaagcatttttacatcatccagcgtaatttcttcacgatctccaataaacgtgcagagcttttgaatctcctgaaaaatcgatgacagatgaccgttcacaagcagaaccaaatgctccgccgcttccgtgccgattgttttctgctctgtttttgcaaggttgacagtaaagtctgtcgtttcctttgcatttaattccttcgcctccatcataaacgcgtgcttctttaacgctttcgtcagcttttttcgctcatcaagcttttcatacggagcaagcaggacaaagactgtgtaaggcgcaggtgattgtatatatgattcaagcgcactgacgttgtgctcaattttttcttttttcttttcacctgttaaaaaatatggatttttcacaatgacaagacgccgctcccccataaacggaaacgtttcagcatctgcaatcgcttgatccagcgggtcctcttccagatcaaaaacggacagattgaaatcctttgtctcctgatcaacgaccgtctgtctgatcctgctgacggtttcttgcagcagatatgtctcttttccgtataaacaataaaccggatggacctctccttttttcaggcttttccacacatcaaataccattgttgtacgacttcctctctttcatcatccccttctatcctaaattgagtttgcaaaatagtaaagaggaagcctgactgctgcttccccatttatattaaacgcctgttcgcaagcccccgggacagcttgtaaaaaggcgataatcaccagaacagaaaacgttaccttagcttctagatttttcaaaacaattccattatacttaagtcagtcaggagggataaagttgaatgattttgaaaaaaacgttcaaagcaaacgaaatgatgctgtagattcagctgttggttttgttgtgtccttcggatttttcgccttcttgtttgtcatggcaacggttattcacctagttggttcataacagcgactgcccgggctgctgatttctcggcagtcttttttagttcgtctctgttatatctgatgtatcatatggaggatagacagaaaaggttccaactctgtttttgtatctatattggatcgttccgttttgatctgttcgcagcacgcggatagaatgtctctgtaatagttgcagaactttttgatgaggatgatggtaccgattgtttttcccggctgagataatggccgttttcggctgaagctgttggatgaattcttcaccggtagagcctttgctcccatggtgccccacctttaacacatctgcttttatattcggaaacacgttcatcacctcttgttccccttctttctccagatcacccgtcaagatccagctcataccgcccgtctccatccacagaacgagagatgaattatttttgcttgccggatcaggtgcttccggtgacagtacatggaactgcaaatcctttatttgcaacacatcgcctcgcttcacctcttcaattgccactccctcttccctggctgcctgcagcactttctcatctttaggttcagaaacgaaccctttcggaatcacgaggcgctttactttatgatgcttcagcagaatctccgcctctccgatatgatcttggtcagcgtgcgtcagaattaaagcgtcaagctgcttgattcccttagcagttaaaaacggaatcagcaccttttcccccagtgaaaacggatgctgtttttcgcgccaaggctctgacgagtaagacaaagtgccgccggtatcaattaagacacgaccccgctgatgcggagcacctacaaacatgctgtcaccctgtccaatatctatcatatccacttctccttcggaactaagacacggatatataaagagcagaaacatcaccgtgcagcaaatgcctccggttaccatcaactgcgacaaggagcgtttttcaatcgccataagcaataggatgatcgtgactgtgaataaaaaaagcaaaacaggtgcaggatgtgcgatcataatcgtgaacacatcaacatctgcaatgtttgtgattaacctattgatccagcttatcaataaatcaaaccagctgaaaaacaatctcccaaacgaagcggaaagacttaatagaagaacacctgctacagctcccggcaaaatacagaaggtataaaatggtaccatcaacatattcatcggtacgctgatgatagaaaactgatgaaaatgatataggagaatcggaagcgagcccagctgagcgatgagtgatacaattgtcagctgccccaaggaggttttaacctgctgaaaaatagaagaggatagaattaaagaaaaactgacggcgaacgatagctgaaaaccggcttcaaagagatgataaggattgaagagcagaaggacgatgtacgaaaggcaaattgcagttgcagagcggacacgccatttgacaagacttccagctaagtaaacacccgacatgagagcggcgcgtagcactgaaggagcagcgccggtcaacatcacatagagcggcagaaataacagcaacagaattgacgccttttctctagttataccaaggcggatcatgatataaaacaaacctgctgtcaaaatccccacgtggagtcctgatattgccaagagatggacaacaccaagcttttgatacgcggtaagcacttcatcctccacgtaaaatctgtcaccaactgtaagtgcctgtacaatccctgtcgaatcaggaggcagaaggctgtttgtgaatgatatgatatgttttctcaagctgagcaccttgtacttgaaattttcaggttcgctgcagttttggatagacgtgacagagtagttccaatgaatatgctgccgataaagatactcgttataatcaaatgcacccggcacagttgcgtgattcggttcttccaatgtaccagtcaactcacatgacattcctggttctatgtataacagctgttctttttcaccagcagactgaatgcgatacgcagcagcccatttttccttatcaggtgtctcaaccatcatagacatacggtcgccgtcaattttgggaatagtgtcaatcactgccttgaattgataggttccctgccgataggaagagacattctgagaatctgtgactgcatacagtacaaaaaacaatataaaagagaagaaacaaacaataataagaaaagcgtgcctcgttttgattaaaatgatgaggagaaagaggatgaaaagaaaaatagcggggaaataagcggcggcagtaattccagccgttgccgaagctgccgccataggcaataataagcgcgaattacgcattcatcacacgtagctcgtgaaaagtgtattcgcctgttcatgtatctttttcaattcttcctccgctaaaccggcatcagccaatttccctattagacccgctacaaatgaaagcttttctctgtttttcagatcaacgatcatttcatcgagttcaacctgttcaacagttacacccgcctgttcaaataattcctgcgcatacggatgtgttttgtaatcctcagcataataaaccgttttgataccagcttgaataatagatttgcagcattgaatgcacggataatgcgtcacataaatctcggctccatcagtcggcaccccaaacttagagcattgaagaatcgcattcatttcagcgtgaatggttcttgcgcaatgatcatctatcattaagcatccttcatctgcacaatgtacgccgcccgcgattgacccattgtagcctcctgctatcatgcgtttgtctctgactatagtagcgccgacagataatctcggacatgtgctgcgcagcgccaataaatggctttgagccataaagtattgattccatgaaattcgttccacgttgttccctccaaatgttgtgttgcctgacctttagtttacctatcataatgcatgaccgtcaaatcactttactgtaatggaagactttattttctcaaatgacttttcacctattcctgaaaccttagtgatatcttcaattgtttggaaacgaccgttttcctcccggtatgcaataatagcttcagctttggatggccccacccctgagatgccttgtaactcctctaaggttgctgtattgatattcaccagcgctcccttccctccatcgctttggacagaccctccgccaccttgctgcactgctgtttcctctccctttttcgggatgtacaccactgtcccgtcctgcagaatctccgccaaatttacttgcgcttcgtctgcttgttcactggtcccgcccgctttctcaattgcctgagatactctgtcccctgttcgcatttcataaacgccaggatgctgaacagcacctttgatgtctatcacaattgtttcgtttgactcgtcgttgtttgcttcctgctttaccactgtattttctgtctctgttggtacagcttgcttcaccggctctttatttttccctgtggccagaaagatcataatcgctgtgaaaacagccgcagaagccgctaaaataattgctttcttatgctgattcaaccaattcatcgtgcatgttccccgctttcgtcatattttattttcataacacatatggtttagaggataatagctcaaaggaggggaaaccattgaagataggctttatcggcacaggaaatatgggtacgatccttatcgaatcatttattgaatcaaaagcggccgatccctcaaacatgacaatcacaaaccgcacaattgaaaaagcgttgcacataaaaaaccgctacaacagcataaacgttaccgaaagtctcgaaaagctcgtttctgaaaacgagatgatttttatttgtgttaagccgcttgatatatatcctttactggcaagagcgttaccttatttaagaaaagatcatattctcatttcaattacaagccccgttcaaaccgaacagctcgaacaatatgtgccgtgtcaagtggcgcgagtgatcccaagtattacgaacagagcgctggcaggtgtttctctcgtcactttcggcacaagctgcggcgaatctgcaaaagcgaaaatcaatgagctgatgcagcatatctctcatccgctgcaaattgaaagtgacatcacgagggttgcatcagacatcgtaagctgcggccccgcttttatgagctatctgattcagcggtttatagatgcagctgtttcggaaacatcagtgtctaaacaggacgcgattttgatgtgtaaggaaatgcttgtcggaatgggaaaactgttagaaaccgaattgtataccctgcctgcattacaggaaaaggtttgcgttaaaggcggtgtaacaggagaaggcattaaagcgctggaaagcggtgtgcaggatatgtttcaccgggtatttcaaaatactcatatgaagtacgaggaggatatttccgcagtgaaaaagcagtttcatgtgtagacgagtatgtcatacgttcgtctgtactgcaaaagcataaaaaagcattttaaaaaaccatcgttttaggaaacgatggtttttgatttctgcgccttgaaaaagaggcgttctgattgtgctgatggctcggtatccgtaaaatcagctgtcacgcgatggagctgaaagccgcagttcttaagcatttcttcgtattcttccaccgggaacgttctttgctcgtgtgtctcatcaaaacgatcatacgcttctccgttccacacaaaaaacgacatatcatgaatgacagaaagctcgtcacttccggcaaagctctgccaaatatagctgatatcttcgtcctggtcagcaaatgtgctatccggaaagacttccgcaattttaaaagatgaatgaacatcaaacagcaggatgccttcaggctttaatacccgaaaaacacttttaaaggtttcgatcacatcattttttgtttttaaataatttaatgagtcacagcatatcacaacagcgtcaaattgaccgtcaaagccggtaatctctctcatatcctgctgaagaaataaaataggctggctactcgataccttttgctgggcgaaagaaagcatctcttcgctgagatcgatgcctgtaacctcgaagcctttttcggcaagccggatggagatttcccccgtgccgcatgccagatcgagaatacggcctttttccgggagagatgcttcaatccattttgtccattgatcgtaaggcgcgtgtgacattagctcgtcatacacgcttgcaaagccttgataaatcattgattcattccaaagtcaagatctgcgagcggagcgtctccccacagcttttcaaggttgtagtagcttctttcatccttgtggaagacatggacaactacatcgcctagatcaacgagaacccatcttgcttcatcaaagccttccatctttttgacttgaatgccgttttcatcagcttgatccttgatttcacgggcaatcgcctgtacctgtttatctgaatttccgtggcagatcagaaaataatcagcaaccagagaaataccttccatatccagtgctaaaatatcctctgcccgtttatcatcgcaagccgcagctgcgatctttaaaatggacttttggttcattcacaaattcctcctgttcagctgccagacacaagccagttatacgttaaaaatgtgtctggaaaaaccggttgattttttttcataagaaaaaccattgtatttttaatggactgaatcagcgcttgattcaaatctgtctcagcaagcttacgcacctcatcgacaccgggaaatgcccggtttggctcaatgtaatcggcaacgtaaatgactttttctaaaagtgtcatgccggggcggcctgaggtatgatacctaatggcgtcaagaatgtcttcatcttgaacccctgcctctctttggaccaaataagcgccgaccggagcgtgccagagctccggattatgatccaataaatgcgcaggcattttttcacgcgcaataatttgtttcatttcttctttcgggcggaatttggcgtaatcatgaaagattgccgctatttccgcttttttagaatcggctccaaaacgctccgcaagttcgatcgccgtgttcatcacgccaaccgtatggatatatcggtgttcggtcaattgctgcttcacgcatgcaagtgcctcctcacgattcatataaaccattctcctctacatacttcttcactttatcagggattaagtagtcagtgggcttcttgcttttaaaccgttcccttatcatagttgatgatacctcaaattccggaacgtctgcaaagagaagcggataaggggtttcaacatgaaaaccggggcgctttactccaataaattgaatgaggttcagcagctcgtccagcttataccatttcggcaaatattcaatcatatcagcgccgataataaagaacagctgatcatttggataacgctgcttcagtaaagaaacggtatcaaaggtatatgatggcccttctctttccatttcaacaagctccagcttaaaggacggattagattgaattgcaagctttagcatttccacgcgatgaaagctgtcggtatagtcttcgttctgtttatgcggcggaatttgattaggcataaaccaaatttcatcaagccccgcctggtacagcacctcattcgccattaagaggtgaccattatgcggagggtcaaacgtgcctccgaaaattccgattttcttcatttcaaccacctttaaggaagctcgatttgtttattttcctttgattccttatataacacaatcgtattgccgattgtctgcaccaattgagagcggcttccttttacaagagcttccgctacatcgtttttatcctcttcgcaattctgaagcacgctgactttaatcagctctctcgcttcaagcgcctcagcaatttgtttaatcatgttgtcgtttactccgcctttacctacttgaaaaatcggcgttaaatgatgcgcttttgaacgcaaaaaacgtttttgtttacctgttaacattctgttcctcctaattttcctattacaatagatctcattttttcaatattaggctcttgtccagtccacaattggaaagacaatgctgcctgttcaacaaacatgcccacaccatcgagtgttttcaagcctttttggcttgcttcttttaaaagtgccgtctgtattggattatacacgatatcacatacgacggcactgctcgcggcacgctgtaatgaaagcggcacatcgtccacgttcggatacatgcccacagacgttgtatggatgataacatcatactgctcaagacgttcttctgcttcttttatgcttaatacttctttattgtgaaacgagggagtagcttctgtaagccgctttgctttttctaacgtccggttgcaaatgtcaaattttttcggggtatttcggacaattgttgtaaaaatggctctcgccgctccgccagcgccgatcattaagaatgacagttcagagatgggcttgtctaataccttcattaatgacttcacgaagccttccccatcggtattgtatccgacaagcttatctccctctcttctgaccgtgtttacggcaccgagcacttttgcactctcatcaatatgatccaaataatccataatggaaaccttgtgcggaacagtcacattgattccttgtacgcctagagctcttattccttttaccgcatcctccagatcattctcttctaccttgaaggcatgataatgtccgtcaagcccgaggtctttcaatgatgcgttatgaatatcaggtgacatagaatggccaataggatttccgataaccccgtacagctttttcatacacctctccccttttcttaaattaatgaacgccgaacaaatacatgaacgccttttggcgcgtatgcagttacctttttatcagcgtcatggacagtaacccagcctaacccagagaaaacgatatctgtctttttgtcttttatcgtaaacgtatgggcgaccaattcaggaaactcatccatttcatctttacccggaggtgtgagcaattcccctgcatgcttttcataaagcgcgtctgcattttcaagttttgttctatgaatcatcagctcattcggcatatagcaaataaaaggagatctttccccagacacataatcaaaccttgcaagtccgccaaaatacagtgtttgctgatcattaagctggaatgtgcgaggcttcagctcctttttaggagataatattttcaggtcctttttattgacataatgcgccatttgatggttgttgataattcccggtgtatcataaagcgatgaaccgtcatccagcgggatttcaatcgcatcaagggttgtgccaggaaattgggatgttgtaataatatcttcttcacctgacacttctttaataatccggttaataaaggttgactttcctacatttgtacatccgacaacatagacgtcttttccgttgcggtaatgctcaatcgcgtcaattacttctctgattccctggccgcgacccgcactgaccaaaaatacgtcaaccggttttaagccaagctctttcgcttcacgcttcatccattggatcagacgctctcttttcagtgacttaggcaaaatatccgctttattgccaactaataagatagggtttccccccaccaagcgctgcagcccattaatccagctgccgttaaaatcaaaaatatcaacaatttttacgaccagagagtccgtttctccaataccgtgaagaatgttcaaaaaatcatcatcagttaaggagacatcttgtatttcattatagtttttcagtctgaagcaacgctggcaaatcacattttctttcgtaagcgatgcaggcggcgcgtaccccaaacctgttttgtcctcggtttggatcgtaactccgcacccgatacaaacaaccttttccatttcttactcctcccactgaatgtgcccttttcgtttgagagcactcagtattctgcgttcgacctggcggttaaagcgcgtaatgaatccgtcagaggaagcgactggcacgaccaaaatcgtatggtagccgtttcggtttcccccgagtacatcggtcagcagctggtctccgatgacaacgcagtcctcttttttcagctccatattgcgcaccgctctattaaaggctttacccatcggttttcttgctttatagatgaatgggattccaagcggttctgagaaaagtttcactcttctttcgttattattagagacaattgtcactttaatgccgtgttccttcatttcttcaaaccactcgatcaatcgcggcgtcgcgttcggcctgtcccattcaacaagcgtattatccaggtcagtaataattccttttacatttcgttcctttaatttctcaggtgtaatatgaaaaatattttttacaaactcgtcaggtaaaaaaaacttttttaacaaaacccgcacccttccctttttctttctttcaaaatgattgtcgaaaaaaatcgaacttgcgcctaaagaaaaactgagcaaaaaaatttcgacaaaaattgggtttcttcaccaggtgtggataaatttacacacactatccactcttattacatcactctttagacaaattataaacacgatactcacaagttatccactttttggtgtggataacagaacgattgttcttatatgcatttcatggtagattaaagataacttcaacctcagatgaatgcaacttatcattgtatgcgttaaaatcatgaatgattccaacttttaaggaggtgcctctcccattaattgggttcctagcatgagaaaactgtctgatgaattactaatagaatcttatttcaaagccaccgaaatgaatttaaaccgtgactttattgagttaattgaaaacgaaataaaaagaagatcgctcggacatattatttccgtatcttcttaataggaatttgtctattttttccgggcgtatttcctttttttactcagatgactgatattatatcactttggctgcgcgctttactactattttcagcaaaaaacacccctaaaaagaggtgttttaaagggccggttattatgctaaccagtatatgccgcccacaacaaggagaacaacaactaaaacaacaataaaagcgtatccatatgctctgcctgcgccatacatgtgaagcgcctccttaataaggttttataacagcctatgtaggagaaataaatcggactaggcggttgtccggctcaacgctgcaggatctgcccatcttgtattccttcatatacgatccttgcccctttaggtgtcatatgatttccagaaggatctataagaccagattggataagcgcttcatcagttgcttttccgccgtctgcttctataaaatgcttccagttatctacaagagggacatccaggcgcttcgacacatctcttgtaatatcgttatatgagttgtgccatttccttgctccgccttttggttcaaaagcagctgcttgatatctggaatagtaaaacaaatgatgcttcccattaccttctataattgggatacacgtcattaagattggcttgatcccgtgttttctgctttcttcaataaaataaaccagattttctctaaaacgctgcttcgacactctcggtttcccctcagtcagtatggcagcgtcattggttccgaacataataaacaaatacttcggtttttgatccagcacatctgtctgaaatcggagacgggcatcctctgtcgtctgtccgccgattcccgcattgagtatatcaaggttaccgcgctcagctgtttttaatatattgacccactgctgtgcttttggataatcgcgataatcccaattagagccacgcgtattactgtcaccaaatgctacaacgtcttcgtatccccttccctcgcatcctgctgtaacgaacagcagaaggaaaaggatgataaaatgtttcatctttacacccccaaaagcctcactttaatgttatacctctgtttctcttcgttcaatgaagagtttttcgctatcactgttttttcctatagttaacgtgtccccctcagtgaatatcattctgctttcattgcggcgcagctgatgattttttaaaattcccttctttccaatctgaaaaacacacaaaccaaagaaaagaaaataacctgaatccgcactggaaacaggttatccgttaaatcctgcatttactttaacttcgatttaagcttggcctttgtttttggcccataaatcccgtctgcagttaatccgttcatgagttgaaaacgcttgacggcattcgctgttttcggtccgtaaactccatctatgccattgtttttggctcccttatcagggtaaaagtgaagtacagctaaagccttttgcagctggagaatgtttgtgccctttcgataaggcgaagtgagctttataaccccagacggcagaggatatgatggtgaagtttcttttggaggtgtatccgaggaagaaattccgtttagaaaagagttccagtggtccaagagtttccgcggacattctttcccggaccactttttgtggggaacaacacgatttaacggaatattgttttccttcatcagctttctgatcagccactgggcatttgatgttgctttttcaaaatcgccgtcagcattttcacagatttcaatcccgatcgatttgcggtttcctgtcccgtttgtaccgtctcccgcatgccagccgttttcatctatcgggagatgctgataaatgactgaatcgtcaactgtaaaatgccagctttcggatgtgttcgggtttttcacaaacttggcgtgcattttcgcatcagcgcctttggctgtattcgctgtattatgcaccgtaatataagcaggcgccatcgcatagccaggacgattatcatttgataccggtataaaatccttttttatggttaccatttctatccctccctattaataagaatgcagaaaacagagagatggacagccttttttatgaggtaaaaaagaattgtgttcttaacctggttttcagttgaacagctgaaatggcaccagttatactaatttagatgacggaggttttgactcctgacatcacctaagttgggagtgaccatagacatgttaaaaaaagtaataggtatacttgtgattatcgctatcatttcagttggtttttttcagaaagaagcttggcttgatgcaatcaaagcaggagggatgttttccgttttatttagtatgctgctgattgctgccgatgtttttttcccaatagtgccgtttgctttgattgctgctttaaatggcgcagtgttcgggactgcaaatggaatttggattacactgaccggctcaatgcttggtacaatattgctgttttttctcgccaggtacagttttagagattgggccagaaaaaaagttcaggcctatcctgccatacaaagctacgaggcttccttcaacaaaaacgcttttaccgctgttttattaggaaggctgatacctgtcataccttcacttgtaatgaacgtgatctgcgggctgagccaggttcgctggcatgtttttttctttgcgtctttaatagggaaaatccccaatattgttgttgtcactattgcaggtgccaatttcaccagcaataaattattgtctatcagcatttacggtacatatattctgatcatcatgctggtcatttataaaaagttccctcatcttctgaaggtgccaaaaaaataaggaggcttgttggcccccttactttttttctgtcgcatggcctccaaattcatttcgaagcgcagcaaccacctttcctgtaaacgtatcgtctgttaaagaacggtatctcatcattagtgacatggcgatgaccggcgttgccgtctgcagatcaagcgcggtttccaccgtccattttccttcacctgaggaatgcataatgcccttgatctgatccagtttcgcatccttagcgaaagctcgctcagtcagtcccataagccaagaacgaatgacagaaccatgattccacactctggcaaccttctcgtagtcaaaatcaaattggctgttttcaagcacttcgaatccttcaccaatcgcggccatcattccatactcaattccattatggatcatttttaaaaaatgtccgcttcccgcttcaccagcgtatagataaccattttcgacggcagtatcacgaaaaagcggttccacaatctcccatgcttcatgatcgccccccaccataaaacaggctccatgccgtgcgccttccattccgcccgacgttccggcatcgagataatggatacccgcttctttcatttgattgtagcggcgaattgattctttataatgagagtttccagcttcgataatcatatcgcctttacttaataaaggtgatacatcacgcaaaacagcatcgacaatgccatgcggtaccataacccataggatgcgcggcgggtgtaataaagaaatgaactctttaagatttgttgtcccctcagccccgtatgctttcagttcatcaacagccgcttgatttacatcatatccaaccacttgatgattgcggtcaatgaattgctttcctatgtttatgcccattttccctaagccgattaatccgattttcatatctgttcctcctgattgtctaaaaagcctttactctttatgttccctatggattgtattgtgatacgcagaaaacaaatggggcttacatcgtctgcgcatgtaaattttatttttcatgaccgacggcgcctgccagttctattactgaatctctttatatccataattatcgctttatccttgatttaccatcagtttaagttaaaatatgggaaggaattcgattttttcagtaaaaagaaggtgacatgttgcagaatcaatctcatactcttattggagttacgaaaaccgctgtattctttttatacgctgcacttgcaatcatcggttttgcaatcgggtattttattccgcagattgcgaaatgggcattatccctcccctggatccctcttgaaggaccacttcggctcattacctcttttcagggatctacagcttcatttatcactgctcttctcggtatgtgtgcggggatttggttcgctcattctgttattgcaatgctgctgtctgtcaaaattacagatcacacagtggaattcatcaaaggaaaaaaagtgcaaacaattcattccgatgacatcgctcttgtatttatggatcacaaacggcttgtcctcctgggaacagccggatatgaattggtacgggaagaaattgatgaaaaaccagtaaacgttgagaaggcctttagacagcatcattacgaatgggcaacagatggtgatccgtttaaagatcaatttcgccgatggattcctgatgcaccagacctatcgcaaggcgcccatgccttattaaaagctcgtcacaaagcactgcaggacgaagaaaaagacgatattgaagaattccgtctcgaactggcacagctgggcatcgttgtacgggacgaaggcacacgccaatattggcgaaaagcagaaacctatcccccgaaaattcagctcggcgaaggattgtaacaacagaggctcaagaaagagcctcttctttactactgcacaataaacagcactctggtaccgtcaggatagctgctcatttgattccctacccacgagccggcgccgcgattatcagaaggcgtcacatatcggacatcagcccctgcaccgccttcctcgcagaccgccatcggccactcatcccggtcatagcccggcttggtcgggattccctttaaagattcctcccgccttttgtctgctccatctctgtcaatggtacaaatatctggatgtccctctgcaatcgcatccctaatatgactgccggtttccggataacgagacagcggaaaatataacactttgtcatacgaagatgcgccttggatctgttgcggaaccattaaacaaagaagaactgctgcagcaagaaacaggcctgccatccattttttcatccccatccccccatacctttgttcatttcaatgtatgggcgcttgatgaagaatatttttaacatttgaagttagtatgctgcttaccaaagccggactcccccgcgagaaatttcccggtacagacacagacagcctcccggtcacatacatttacatataggcttttgcctacatacttttgtggaggtgacgatggtgacaggtgttttcgcagcgctcggctttgttgttaaagagcttgtctttttagtatcttacgtgaaaaacaatgcctttccacaaccgctctcaagcagcgaagaaaaaaaatacttagagctcatggctaaaggggatgaacatgccagaaacatgctgattgagcataatcttcgcttggtcgcccatattgtgaaaaagttcgaaaatacaggtgaggatgcagaggacttaatctccatcggaacgatcgggcttattaaaggaattgaaagctattccgctggaaaagggacaaagctggcgacgtatgcagcgaggtgtattgaaaatgagattgtaattacaaaaggggggtgcatacacccctctttaatacgtttcaatatatatggtgtcagaatccacaatggtaacttctttcacgataaagttaacaattgtttttttatcttcaagagttaagttatctgcaccgattgattgaaaatagtcgatggctctttttagagcattttcacttgagctcgtatcatctaggactttcatttttgactggatttcgttacacttttcagtaagctgattttgctttttttgcagttcaataatttgtgctttgatttcatctatgtctaaatcatcgtcatcgcttaggctgattagcgttaaaagacgcttgcggcctttttttgttttctctatctctttttcaataagttctaattcatcagacaggtgatttgattgttcagcctctttaaaagaaacatacttttgaggatttgtgatgaatttaaaaatttcaccccatacatgccggttcaatttattctcagacatttcttttccgcagccgcggtcctttgcgccagaataatttttccggcaagtatatacatagtagtctttaccatgtgattttcttttcttccctgtcatggtatttccgcattttccgcatctaaccaaacccgataacaagtaattgtgagggctgatactcaagtgttttcttttactttgacctaagagttcttgagcataatcccattgttcagctggaacaattgctggaattgtcacagtgatttgttcttcttcaggccttattttaattatagatttgttccctgcctgctttgaaacataggaaccctctgtatcatatttatactgtctatgttcacccttataggaagagttcattaatatttgccgaacaacctgcctgtgccatactttggcgcctttttttgttttaacccccatctgagttaaatgtagagcaataccatttactctgccgaaaaaagggcttttatgatcggtgaaatagttaaaaatcatccgaatgatttttgcttcctcttctaatatctcaagagttcttttctctttaacaaatttatagccatatagtttagaatctttaatgatcatgccttttttcattttttgaagtcggccgcttgatgtccgttctttgattttggctttttcaaattctgagattgccccgcgcattgcgaaaaacaattgaccttctggagaattggcgtattcaccatttacaaaaatcaaaggtatgtttcgctttcgcaattcgtcatcaatgattagctgattcattaatttccgagaaagacggtcaggatcgtaacaaatgacttgacttataagtcccttgcttgcatcctccctcaagcgattcaaagccggacgttctaaaagctctcctgaaaatccttcatctgcatacttcagcacatctttagtccctgctttctttatacaggcctcgatttggctgtcgatgctcgatcccttgatcgcttgttcctcggtcgatacccttacatatattgctatcaccctgaatctccttcctataaagttttattaaataatgatagcaatcgttaatgcatttgtcagcttgcggtccctcgatgattatcactttcataaaatgcatcaccccttgggtaatgctatgtaacagctgtttgtccaaatgaggagattttaaattaaactatagtgttattaaacgtttcaatgaatatgcaaaaaatttaaaaaaagttgttgtgacttttctacactcctttaggtcctcaatagaaaagattttattttctatgcctcaacattcgcttattatagttttcaatgatttattattatttgagagtacaatggagtagtgtttttcattgttagatagttaatgacatttcactggtgtcaagttcgtatagctagacattaataaaaaaaggacacatataaatatgcatcctttaacaaaagagtttatttatttccctgtttcagcaaattccttcaacctattccctatttcatcacgaactctttggaaaaacgcccatttttcttcttctgtcccttgtgctcttgccggatcatcaaaaccccaatgctcacgttttacatgtggaggcgtcatcgggcatttatcagcagcatctccacaaagcgtaacaactaaatcagcattgttcagaatatcagaatcgattatatctgacgtttgattagagatatctataccaacttccttcatcgctttaacagcattcggatttaatccatgtgcttctatccccgcgctatacactttccactcatcacctaaatattgtttagcccatccttcagccatttggctccggcaagagttccctgtacataaaaagtaaatgattttattctccatatattccacctctacatcgagtgacttccaaagtattttcgttgaaaccataaagcaaccttaacaagtgctatcatgactggcacttctacaagcggaccaattacggcggcaaatgctgcacccgaatgaattccaaatacaccaacagctacagcaatcgctaattcaaagttattgcttcctgctgtaaaagctaaagtagtagttacagcatagtttgccccgattttcttccctaaaaagaaggaaacaaagaacattaaaacaaagtaaatcaataatggaatcgcaactcggacaacatctaacggcaagctaacaattacatcaccttttaaggaaaacatgacgataattgtaaatagcaaagcaattaacgtaattggactaatcttaggaatgaacactttttcataccattctttgcccttcacttttacaaaaatataacgtgtcaccattcctgcaataaaaggaactccaaggtaaatgaatactgattttgcgacttctgccatcgtaatattcactactgctccttccatccctaaccattgcggaataactgttacaaaaatgtaagcataaactgagaaaaaaagcatttggaaaattgagttgaaagcaactaatcctgccgcgtattccgtatcaccttttgataagtcattccaaacaataaccatcgcaatacagcgagctaatccaatcataataagcccaatcatatactccggtttatctggcaaaaagatgatagccaaaataaacatgagagtcggtccgatgatccagttttgcactaaagataaaattaacactttaatatctttaaatacccgtccaatttcttcatatcgaacctttgctagtggtggatacatcattaatactaatccaatagctaaagggatagatgtagttcctacttgtaatttgtttaatccaccaacaaaactcggaaatataaaacctaatcctatccccaatgccatcgcaagaaaaatccagatggttaaataacggtctaaaaaagataaacgtttcattactttatcctcaccttttttactaacagcaagagttcgttgtaatatcacttggcggtgttacacaacaagaggaggaatcttgtttttgaacctcgctgttcgatttggtatagaaaaattcccactcgttcccatctggatcagtaatccaaaatttatcttggactgcataacaacaagtcgtatccatttcttcacgtgcaaaaaacccttctttttcaagccttttcttgtgtttcaaaacttcttccaaactatctacttggaatccaaaatgattcacttgatttcccttcacctcatctgcgacatttaaagtgaaattcagtccaggagtctctaatagaaactttgcatagtctgtttttacttttacagcctttactccaaaaactttttcataaaaattgatcgatttctctaaactgacaacgttaacccctacatgaacatatttcattttaattccccctcttatatattaatcaaaaaaatttgatataatacctaaaaaatttttttagcagcaatctccttcacctttttttctaaatatacaacaaagctcttctgataataaaccatttacttcctcatcatttagatcataataactccatgttccctttgtctctttcgttattaagttggcatccaataaaatttttagatgataagaaagtttagattgcgtcacctcaaaaatctcagtcagatcacaaacacaggtttttcccctttgacaaagttcatacatgatctctaatcgtttctgatcagcaagagccttaaatttttgttcatatttccgtagcagttctgatttcgtctcatccattcatatcgccttctttaatcaattttttttgatgtatttattatactcatgatttttaaattaatgcaagcaaataaatcaatttattttgattaattgtaaaacccgctaaaagcttgtgtaaccagatagaggttttccatttttattatttcctccatcgctactttgctactacagcaacggagatcataaacgctaatttctaatttcaagaaaaaaacattaaataatttttgtgaatatgtagaatcgataataattcgagataatacgtatttagtcagagcacacagatttatcatcaattaaaaccttatgtgaagatataagccattcaatccatccttccacataaggttttaaacaatttaatcagaccttttctttttgaataagttcttcattttcataaaagggcattgtgacacttgattttcatcatctcgcaagaagtactgtttccactccagattgtctttttttccataccatcctaaatgcggatggataggtacttcatcatatgcctcaagcctttttcgaatttgcttactcatatttcgtccaaatgcagtagtatcatttagatcctcaaaaacccatctaggctgaaacgtcaacataaaataaggaaaacttctgctttttcttttgctgtgagccggtgtagcacacagaacaaaatatggttctccattaaaacagtattcccattgaaagttatctggattttctggtatatcatctggccaatcagctggatcttccatactcaatgaattgagcaactgccaaaacaacgattcgtaatcctcaattttgtaatcagtcagtaattcttctggtgtatgaaatattacagttaatgatgcatactttcctgtctctcgtgaaatagttccataccgagtaagcaatggcgctaattccttcgcagtctcgggattcctaggatcaccgacaaaagcaattcgcagctggtcgcttaaaaatgcttgccttcccggtatacaaggaaatttattttctttatcacctattttttcattcaaatagttaaacgaatctaattgccaaccaggtagcgtttctttaattttttcaagatcacttttagcatataactcagtcaataaatccacctccgaaggcatttatcataatgtattgcgggagcacgaaggaggtgaatgtctaattactttttcatatatccaaatgaatattaattaattaattggttaagttttagtgggtaggtaagtaattttcttatcaagaaaaatccagaatcagttctgcgtttagctgtacatgcacactcagccctcaaaacgactaacgctggactttctggatgttttcaattttaaactatcacaagaatgaccgaaattccctgttttttgatgccaagtcatggtactcccaggagggaatttcataactctctaaagcaaaaagttattgcggtctcaccgaaaatttaaattgcggtgccctatttcctttttctgcgaacgaaaacttgttaatatttacagtactagtagagttaagggaagggtgaatatcttgatatcaatcacatcagctgaagtgggaatgaagattaatgaatggcataggcatattcaaaaattcaacgtaactgatgctgaaatgttaaaagctgaaatagaacgtgatatagaggttatggaagaagatcaagacttgcttatttattatcaactaatggcctttcgccataaaattatgttggaatacacgctgccatctgatgaaaaccgaatggaactttcagaatatttaaataaaattgagggccataagaaaaaattagacaatatgcgggcatattattataacttcttccgcgggatgtatgagtttagaaacggtgaatacacaagagccattacatattacaaaaaagctgaacgcaaaattcctacaatctccgacaagattgaaaaagctgagttttattttaaactgtctgaagtctattatcatatgaaaatgacacacatttcgatgcattacgctgagctttcatacaacatttataagaaacacgagctttactctgttcgtcgtattcagtgccattttgtcattgccggtaactacgatgaccttgaaaatcatgaaaaagctctcccccaccttcaagaagctttaaaaggtgccgagctgcttaaaagtaaaaatactcatatctatgccactgcgtttttcaatctcggcaattgctatcacaaaatggacaacttaaataaggctgctcgttacatcgaacaagccttggttcaatacagaaaaattaactctgacgtacttccgcaagcttatcatgacctagcgttgatttattttaaacaaggcaaaaaagaacaagcaatggattgcttccgcaaaggaatcagaagtgctgtagattttaaagacgaactatttatgaacttatttgaagcattagacgttctttatataagaaatggcgatacacctaaacttctcaacattttttctcgtttagagaacggcaaaggatacccttatctggaagagctggcattgttaggaggcaaccttttcgattataatggaaaaatagaggatagtatcatctgtttcaagaagatggtatatgctcaaaagcaaatatcgaaaggggaatgcatgtatgaaatctaaattgtttatcagtttatccgccgttttaattggacttgcctttttcggatctatgtataatggcgaaatgaaggaagcatcccggaatgtaactctcgcacctactcatgaattccttgtttaattcgataaacaacattagttctgattccctttagccgtttcataacggctttttcttatttctaatactgaaaaaatctatcatacttaaagcttttgaggtgaacattttggacttatttgatgaatgcttagaagctctagggaaaaacaaagaaatcttatcagaagaattaacggcaaaatattatgaactgctttcaaacagttttcccttacatcttggggacgaatcaagtgggaagaagtttgttgtcatcaatctatagattacgaggaagagatttacgattggctagctaaacaccattttaaagataggaacattattattctttggggttacggagaacagccagcattaaaaaccagtcttgagcatgcattaaacgtaattgatgatgtaactgccgttggatcggatacttttatgtttagtgaatctggctacgttatcgaattttttcatgatggcgatgttacaattggaaagtcccctttcattgaaaggattaacaaataggtaaaatgacacagatcgaatgattcatttccaccatttgatccacataacagttagtttcatcattcttccatggtaatattttgttatgacgattaaatgaaaggatatgatcatgaaagtatttgaagccaaaaccttgctcaccgaggctgaaaagcgagcacaggaatacaaagatttaaaaagtaaaatggtcaaattaaagaaagcgttcaaagctgttgcagatttagatgatagcgagttttcaggcaaaggcgctaataacattaaatcattttatgaagatcaagctggcattgctgaccaatggattgatttaattgagatgaaaatttctttcttaacgagtattcctggttttttagaagatgccaacttatcagatgcctacatagaagaaacctttttagcgcatgagcttgctaacgcctacaccaaatcaaaatccattatgtctgaacagaaaaaagccatgaaagatatattaaatgatatcaacgatatactgcctttggatctgttctcgacagaaacttttaaaaatgaactttcgtctgccgaaaagaaacgaaaagaagccattgagaaaatggatgaagttgaccaaaacttaacatcagaatacggactatcagaagcaaatgaacaaatgattcaagctgattatcaagctttaatgaatgcgacagcaaaaggcaaaagcgcctctcctattcactataatgcgaaggcttatagagacagtgagattcacaagatgactgaggatgtaaagaaacaatcaacagactacatctcttttaaggaccaacaggcggaacaaagaagaattgcaaaagaacaagaagaactggcgaacagaccatggtatgaaaagtcttgggatgctgtttgtaattttacaggagaggtctctggatattatgattataaaagagccgctgatggggttgatcctgttaccggcgaaaagctaactgctggacaacgggtcgctgccggtgcaatggctgcggcaggatacatccctatcgtaggatgggcaggtaaattagctaaaggtggaaaagctgtttattcaacaagtaaagcattgtatagagcagacaaagctctcgatgtatataaaacacctaagacattccatgcccttcaaaactccagcaaaggactttatggacttgcttctgcaaatggttttagtgaagctataacaggacgcgatatgttcgggaataaagtctccaaagagaggcaagaacagagccttagtggtgcaatggcaatgttggttcctttcggagctcgcggaattaacaaaaagcttaatgcaaaatcaagttctcgagttagcgaagcatcgactaacaccagcaaaaaacctaaagttcctaaaacgtacaaaagaccaacttatttccgtaaaggcgttagagataaggtttgggaaaatgctaaggattcaaccggatctgttaaagacccgttaacaaaacaagtaatgaaaaaagatgaaccatgggatatgggtcataaaccaggttatgaatttagaaaacatcaacaaagtgcgatggaaagaaatattagtcgaaagcaatttttagatgaacataataatccagaccactatcaacccgaattaccttcctccaataggagtcataaaggggaagatatgacggatgattactttggagattaaggagagattgtctaatgggcgtaacacaagaaaataaagtaattgctagaacagttttaggagcttttggggggaaaccgaaggttacgaaatattgggatgataacaagaatagcagcatagatattttatcggttagtgaccagcctcaggaaggtatcacgtcatattcaactctaggtttgtcggatcattctattaattatgaggtgaatggcactccgttgcggatagaaatcgtagctgcaatggagtcagcttcagacatatatgctaatgttttatcaacttgtgcctttaatataatcaactcaaatttcacttgtgcaccaggtgttatttttaaaaatgtgattagtatgtatgatcaggaaaccgacatgaaacatattatgttcgttcccccatttttatgggaggaagatttagaactacttgaatttagtaacaaaaatgttacttggctaatggctttacctatatccgaaggagaattgcaagtagctgaaaaacacggctcagattatttacaagatcttctggaatcaaaacagattgatatttttgatataaagagagaatctgttgtttaatgactttaataaagaagagtcactttataagcccctctcaatgagaagggcttattttatttaatttgaaatcagctgcaaataatagaagaaaatgactgaggtaaggagaattctatgattaatgaagaaaaacacacaaaccctcaagctaataacaatatatttggaaggatagatacctggtattctgttcataggagttcgaacttgagggaaaataaagaaagaccagcttattatgtggctggtccttatctttaattaaagaaatggttatgtaaagctttagaaaatccaaaaccttcttctggtccctttaaccagagagaaataaacttttcgaaatccacttctttttcaatatctttcaaaattcttttaaattcttcagtaaagttatgaagagagacctcttcgccatttttaatcttatcagtgtactggctcgttaactctcttaattcttgatactgtttttcacttaaatcataggccaaaacttgatcaaataagccaaaccgatcataatcagctgctaattgttggactaaccttagttgaaaagcctgcttctcgacttttttttctaggttgtcaagcctttcttctactgttaccaattcaaatcacctcaattaaaaagctaagaaagtaaatacacttgcaatagttctagctgtagaagattttacaccagcatcaattagatatgaggaaaccgtgtcaataattgcgtcctccacaacgtcacctcgtttaactaactcgtccaaagcatctgctacatcatcagtatgttttgcgaatgtttttcctgctgatccacctaactcatcgactacctcaccaacaattctcccaccatgtcgaagcgcactggctgttgccttcattgcttctttagcaatccattttttaataccatttgtgtgaaattcaccagattgttcagttgtattagttggtaattcggatagtttaacgggagtttgataagtgacttcctgctgtgcctgtaatgttacctcttgagctttggcatgtccatccaacggaagaactaatgataaagagaatgttaatgcagatgttgctaaaagtaatttcttaaacatgaaatcaatccctttcttttaaattatttacatgtaaatgataacattatgttcagactagaaaaataatactttttactcaaatattagaataattttgaactatctgtaacaaaataaacataagtatctccttgagaaagatactcaaggagactatttatttacttcaagagagcttcaagtttcgctttcgtttttggtccgtaaataccgtcttgagtaagcccgtacatagactggaatcgtctaattgcatctgctgttttcggaccatacacgccgtcaatgccgttgttttttgctcctttatccgggtaaaagtatagtgcagccagtgctttttgaatttgtgttaccttttcccctctcatcattgggctcttcactttaaaaataccggatggtagcgcatatgacgtttttttgctgcttgtgtttgttgttttctttttagctacacttgctttgcttgagtttgtttttccgcccaactttttcaattctgcttcaattgcagtcttaacttgaatccatcttccctctgacaaaatgcggtgcgggcaatacttaccattccagtcttgatgtttgcggactcgatcaataccccatccacgttctttaagtagctgagccacaaacttaatagcaagcttttccgctgccttatatcgtacccctcctgacttgctataacaaatttcgacaccaatagacttgcgattccctgtaccgtttgttccatctcctgtgtgccaagcgttacgattcgttggaataccttgaatgacttgtttatcgtctactgcaaagtgaaaacttgttgagctagagttattcttcatgtaagaaatctcattggctgctgaagcatcattcgcagtgttatgaatagtgatatattcagctttcattggattaggacatttcaatccatactttgatttagagactagattctttacaactttaatggccatataccctctctccttctgtcagtaagataaaaaaagccactggcttagccagcagctttgtctgcgttattcttactctgttctttttcgttctcaattgtttgtaatcgatctgttattgatgatggtattttaacaccaatctgtgctaagttttcagttattgacaaaccttcattagcgatataaaaaagaacggtaccaaaggttaagacaccgttcaaattgagtactgtatcaatcacgtttgctaaaatgaccgcaaagaaattgagtagcttgcggacatagccaaaccatgcgcttcgacttcgcagttttttgaatttccatgccttgattactcctgttaaaacgtcaattatgctaagtactagaagtaaatcaaggtacttcacccctccaaataaatatactcttgctaaatctaatgtttcaaaattgataaacaaacttgtctcctccattctaatcacctcctccgaggcaaataaaaaaggacagccggatcttatgagacggccgtccctctaactgaaaagtttccatttgttaaagctgtaagctccataacaatttctttaaagccagtaatgctaaaagaccaagcttctgattttccttttgtgctagtggcaaacgttccgtcatccactttctgccctctaagggctctttttgttcccgataaggatttaccccagaacttcaattcacttgtctcagccgtcccataaacctcaatgagcaacgttttgaatgatccaacggtgaatgggttaccctcacctatggtttctgttttatcgtgaaagacaatatccattgtttttgattgagtgtctaatgagctaagattcaagccttcagtttgaacttttaaacgaccatcattagttaacccgcttttatctaactggactgagaacggagcaactgctgtaataggaacagtatggttaatgtttatatcctcttcacctgcgcccaatgactggtaaagtaagaattcagattgctgcaggttaccatttgcgtatctgaaacggaaatatcgtttagttaaatgaatccactcagtctcgccaagcgtatttgctttaacaaccaatgaagagattgtggtccatgaattcatatcgttactttcttcaatgaataaggtaccttcacgatcagaataagcgtgaccttttacttttgaaattaaaacctgacctaatcgatcttgtccatattgcgtgtagacttcagtggcttttaaaactgcgttcgtcagcagctctgaattaccggagattgaagctaccggcacaacaaaatctctgtttccttctctgtatggcttggctgcccccggcttaccagttgcatctgttgaaaattgaaaactatatgatgccattataaatcctccttgctattgtagatcattagtggtgagcatgggtttacaacggaaccacctcctttaaggaaaaataaaaaagccctaaatggcttctcctgtgatctctttatactgttcagctgtaatgagttttttctctattccttcctgtaaatcttcgggcgaacaatctttgagatgaattgcctgtttcaccatttcagaagaagcccagttataatgcaaagccagcacccaataattcatgaaccttgccctccttgtagagtaagcagttgcaactttatttttgaaagctcgcttcccaaagtttggtttaattcttcaagctgtttacgagccagtttttcctgtgacaactctcttgcaagtagatccacttgaactggtggttcatatgcagatgtactctgaagctcttcccaccaagtttttaactctgcttccgtgggtataggtgccctaatattccactctgctatatatgagggagttccatcaccattattctggacaataaaatcctttgtgggatcagctgttgggtatttaaaaagaatagcttcacctatattcatcgttacctcctaaaatcttggatagtttcggcctccaagttcttgtatatcaaaaaagttaaatacaccatttttatcatctactgcccttttcagtgtttcgtctcctccgtaattacagtagcaccagatttcaacgtaatctcctttattcatgggtacagtcgcattgccgtttaaaccaagattcatcccattatccttttcctgaaagtctcctcttacatggtgcagtgttttatatgcttttccatttaggtaaaccttcaaatgaaagtttatataagatgtataatttaaggtatatatacttgccccgattaagtacattccatcgttcggagcaataaatcgattgtttttagtatcaaaagcattatggctatccttgatgaccctgttaaatgcaattttagtgtgatcaatcttttttaaatactgaacacctgtagttccaatattcgcatgagcaaaacctgatatcttttgccacggagtccagcctgaaccactccaccagtgtctaatccaaactcctgtactgtcatagtaagtcccagactcattccctgttccgtaaaagtattgagtgaaacggtaattattatatttttcatttttgacaatgccataacccaaggggtagcctgtagtatttccctgcccaatgtccattaaggtcagtcctaaaggatattcttcccctcctgttcttgcatcttgaatagcattgtctccagtaattaacgtcagattgttatttttatagttggtatccacgtaatattttgcatccgataaagccttatccgctttttcctgagctccgacaattgtttcttttgcattccaattctcccgttccactggtgtaatgtgccgttgtaaatcattacgatgctcttcaaattcttttttcgaagcttgctgtacattatcaacgttccctagcccgatttgcgcctttgttgtattgtgagggttgttcatgtcatttttatgtacagctaaatctttatgcgcatcttgaatgcctttctcccaacggttcacatcatcttcattaatcggatcgtccgggagccaatctgtttttgcatcataagccattgttaaaccacctcaaaagtaatcctaaaatctagcgttctattattactaacgtctaaatctgttgttctttccgtaatcacgttgttttgatcatcaagtatctgaacactcttaatatgtttgatgtcttcctctcgttgagtaagcaccgtgacaacggcaccctgaatggtgagttccacaatttctgtttcatttccattcagcagcactttcgatattctatttttcaaatctgcagctgtacgctctctataaagctgtgtaatcatacaaggaccacctcgttattattgagcgtgacggaataacctacctttagctcacttgcttttcgataccttctgttattcaaaatgacagtatcttttatttggagtggctcattcaaagcagctcgcaaggtatatgccaaatgagctggcttcatattctccaatgtttctatgagctcgctcatatgctgcatatcatctatatcaatatcaaccttaaaacggtactctccgggaagcagccgaacctgagctgacggatttttcaggaaccggttcaacgcgtgttcaatggccctatatgttgccggcggtatattggacattttagagattaggcgcaatcggcggatctcatcggtgtcacctgattcccgcggtacgttcaaaatcttttcccatcgttcaagcccccaggttgccgtagtaacaaacagctgatctgtcagatcaaagatgctgttattttgcttctcaaattccggagcttccgctttaagaagttcagccatttcctttaacttggtaaggaacggcggcaggtaagcagtcatttcatcgagtttgctcaatgatgttcacctgccccaatttagggatttcgacggcactcagaaccaaattttcggccacgccgttgattttaatatctgcgtaatcacttactgaaggtgaattgtagacgatattattaatctgcgataaacggatgacgttatcttcaaaggcaatctttttaaaaagatttaaaacacctgattcaatttcttgctttacctgatcgatagagctattgacctcgggaagtacctcggctgaaatctcaacctctttccataccgcactctccactgtgacaaaggcacctattggcgcttgtccctcaccttgtccgggttcaggatcaatatagtttttcacctttgatattaaaatatcggaagcaggttccaagttagcattggtcacgacaattttgactgtaccgtccccgttccaaagcggaaagacctttaccttccccactccgtctacttcttcagcccattgtttatagtgtgctttattggcactgacagcttctcgacgcacgcgggtaaaatatctagctcttaaactgtcatcatcctcttcttcacgtccaggaatcagaatctctttcacaatcgctttttgaagcccaggtatagtgtctaatgacaatagattctgaccggatatgtttgcgttccctgcttcccccgctgtttcacactccaacgtcccgtcagctgtgtattgaaaataaagattatcaacataaaagcgagaccctacaggaatggtcacgccttcagtaaactcccctgccctgactgcttttgtggcagcagtccgctcaatgcctgcttcagtagctcgtcgatctaaaaattccccttgggccgtgtctgagaagacaagttccagaacagtatcgagccaaatataagacttggccaattctgcggctacaggagctaacgcgttataaatcacgctgccttcccttttatcaatgtccgctgaaatgctgttcaacattcgatccataatcgattcataggtttgatcttcaaacatcctcgccaagcacctcctcgatctccaatgttccttcgtcagtctcgactgtaaaggagacacggaacgattcgccttgtttttctatttcaaaatctgtaacagcagaaatccgatcgtcatagatcagtgcttcctctatcagccgagggatctccattttcttatatgcgtctgttgtttcgttatctgccagcacgtcttgaagttcatttccaatgtcatgactgtaaacagaatatgcgtatcgctcagtatggagagacaaatatacaaactgcttgatcgcttcaaggcctgtgatgatttcatttgtgatacggccattttcaaaatctattttgtaggtttgcgaggtctctatgacttcgctgtcatcttctatatcctcaaactcgatttccggagacaaagccattccaaacacctcctatattttgtcgagaataaaaaatgattgcccgccttttaaggagacaatcatcacacgctcacctgtatttaatgcttcttcaccggcccgcagccgctttggaacaataatcaaatcagcaggtattattaatttgtcattttcattaagccttatttcaacaggggaaacggaaaccacttcagccggtagaatatccactggcgactcagaatcaactgcacggacagccaaatgtttgattgcttcacttaatctcatgaggaaacaccatcagggatagaatttttctcaaccacatcaatggtcatcgtgtgtgtcgatcctttaaattcgtgtttgtctgtatcgatccagtatgttttcttaaccccgacttccggaattgagatatagatgggcaacccgctctgaagatccggaatgccaatcgcttgaatactcttgagttcttttttaacaccttttttctgtgcctgtttgactttcgcacgctcctgaagctgcgcctggttaatgttatcagaaaccgtttcgacatactgaagcacaccatatttactgatccctgagctgtcacttgcagtggctgtgtatgttttattgtctttctgccggcggagctttacttttgtggccgtgtcattaattgaagtgctgtattgatagccggtgatgttcacacccgtctccaacacccatacttctgacagatctggccaagcgcgaaggccaagcttccccttcgcagaatataattgataattccttccggtttggcttttcgtttgtttcaaggcttttagaatcatgtcataaaggctcgtatcatctttaaacactaatgatttaatggtgtaacctgtatttgcaatggatgtagtcggaatctgaaaatctcgcgccaaccgttttataatctcgtctgcacgttgatttgagaaaacataaacatctttgttcttgaccaaatattgcagcatatcataagccgtaaaagtcatccagtgttcttccggattgcgagaaaacacaatgccccggaacagttctttgcccttccacttaaataaaactgtatccccttcagatacgctgtaatatgaatgggttccctgtttcgtaatgatcttggccgtaatcgatcgcggcgcctgataccgttgcccttcgagggaaacactttcagttaccagctcaagccattccgtttctttaatgacgaaaagttctatcatgtcatcacctgcttactgcggtatttttaatttttgcccaggaaagatccagtgtcctggctgtcttatattccgtttgcttcgtttgatcatagcctttttattgactttccatatcttgcgccattttgtactgtctccataaaatttgccggcaaggtcccacagtgtatcgcctttcttaacggtgtatgttttaggagctgatttagatggccgtttcttcttcgtctttttcttctgcttgatcttccgcggcgaagcagttttgtattccttcagctttatttcataatcacgatcacctatatctttttggccctctgtataagaaaaaacctcgatactgcaagttaaattaattttcgttccagtaattaagaattgaaccggctttttagatttcacccatttctcgatctttgcaatagcattttcaggagaaggaaatcccttatactcagcaagcgggctgtgtttctttggaaaaaaagaagagaacgaaatttctttcgctcccggtttatcaataaaagtgatctccccaaaactagccacttttactgattcattttgaattgtgttggatatatcaatttgttcaggaaggaccggaagccgcagcttgtccttcccttgtgaaatccagaattcatatatggatttagtcaaaagcaacgactcccttcgttccaatgttgatatcctgttcaagctcatcgacaagggcctgcttaatcttagctacaagactgttcatgtcttggtcattgtgaaaatgctgatcgccattaaactgaataatgacctctttgccacctgcagctttaaacgttgtttgattacgacccgttgtggcagctgttacctgacctgaagataattcagtttgacctttttcagatgggtctgtgacttccattccgagtgccttagctgcttgggctaataaataacgtccacggatgcctcgctcctccggaatgatccattcccttttgtttccttcaccgacacgggcaatctgctctttggtaataagtccgccgttagcgtagccaacatatggacctccatgtctcatgcttctaatgcctggtacattattaattgatccatatctgcttttgatatagccaatcgcagcagcagcgttgtgaatcgggttaagaatgttattcatgcccggcaatttgtgtgcgttgaaggtacttgggattgtctgcatgagcccctgagatggatgtcctgctttcgcattactatcccataagttgattgccttcggattaccgcctgactcatgctgagcaattgtcatcagccctggaagccagctcatcggtgtctttgtagccatgatagcagccatgagccattgcttcacatttccgcttactgcgcccattccagaataagcggcagctagtgagcctgcttgtttttcagcaaacttttttacatcaacagaatccagaccttttacaatacctatagaggcaaaacgcccaagactcatcatgacacgggaaggtgaatgaatatccagctcttcacgaaatgccttctcaacttttttcgccagttccttggcagcctcattgacttcacttgccttagaagtcatgcctgaaacaaaattaccgatcataccgcttccccatccgtttgatgattctttagagcggataaacggcttgttaatatgagtgctgacgtattgatcagtaccagtttgtgagctattttgtccggaagcaaaacctttgatcgttccgcttccccatgatgaagatttattaacagtgttctgaaatggcattttaaccttcgtctgcaagaagccatctgtaccggtcgaagtgctgttttgacctttagcataaccattgaccacttgctttccgtaattcggagaataagagattaaattgttcattggttgtccaacgtttttctgtttccatgcttccatagaaacaacattatctctaattccttgatcaaagctcttcgtgaactgttgaccaaatgatgttgcttgttcatcaagactggatgtgtcaataataggagatacagaagcagtcaccgccgcactacggactagcggggaagttgccggttcacctcctgcagatgaagcagacgctatatcatcaaccacactcatccctaatttcgaagcagcttgagaaaggagcattttgccgcgacctttattattctcaacagggataacgaattctttaccagcttcaccaatccaagatattgttggcttcgtaatgtaaccaccagtagcatgtttctttggcttttcttttcccgaaccaaataaataatttacgccactcttcacatatccccacgctttaccagcagtttttttcgcacttgaagctactttaccaccaacttcttttaccccgcctaaaatactgcttcccaattcctttacactctgccacttttcagaccaccacttcttactaaaaagggtttctgagatggaactcttaacacttttccatattgatttagcattgtcccatttatttttggaccagctttttacactttcccattttcctgaccaccacttctcgctaaatagagtggatttcagctttcctttaactgattgccaaacagaagacgcgctgtcccacttactttgagcccaactttttacgccttcccatttacctgaccaccacttctcactaaacaaagtggattttatttttccctttacggactcccaaacagatgatgcactattccatttgttttgtgcccagcttttaacgccagaccacttttcagaccaccattcactattaaataaagtggacttcaccttttcttttacattagaccatgtatcacttaacccattgatggaagtcttcgcattactcttaatgcctgaccatttttcagaccaccatttttgatcaaataatgtactgtttagtttcttctttacttctgaaccatcaaacgctttacctaaacttgagccgcccatggtgcctgctataccaccaactaatccaccaatagctgttcccactcctggaataacactgccaatagctgctcctgtagccgctccagcaaggccaccgccagctgatccaattttttcaccaacattatctttattcatcccaattaaatcggttgccgctaacgctgttcctaatagagggactccctttgcaaacttgccaacacttttcagaggacttaagactttcccgaacttcgatgtaccgcctgcagctctaccagctgagtatagctccgatctcgtagtgattattgctgatcttgaatctctagttggattagtacctacagttctaccggaacgccttctctccaaccgttcagatgacacagcaattgaactatcagaagggttcattcggtttggattaccgcgtcgacctaaaactcttttccctcgtcttctacgaatgcgatcatttttacctccatcgctacaacagcaatatgtcaagctgccgcttcgaggtaaactcgttggacctgtggcagttttggattctctgccccttgtgctagcattacgattactgtttctattcctcctttcactttgcgtattagtaccagctttaggagtacgttttggaattaattttcggattacgcctgctgcatcacttccgacagtacctatgccttttaacagcggacgaagtattttcaaataaccaatcaatccaattaaagaggggatcacaactttaatcgctgttttcaaatcatcccaatggttgacgctccactcaatggctacgtttaacttatcacctatctcctcacctagatcagcaatatcttttttgatctctttaagtttttcctgaccttctttactgttaatgaacgagctgattttatcaaaggccggtcctaatccagttagcagagaggttcccatatccttagatatgctttcaaaatctctcatggcatcattaaccggtgtcatcgggttattatcccgaagtttcgtaaagcttcgttccaattcaccgcttgttttggcacttgtaccaataccctcagccatatctaaaataggctgcttaaggtcttcatattgtgtcccgataagctcagtcgcaatagcagcccgctttgttttgtctttcactttagaaagggcttttgccaccctaaataaactttcctctccgcttattgaaccatctttgaagcccttgaacattttcttagtttccttggctccgaacagtgttttaaatgcgtccacttgactatcagacatttcggttcggcggatgttaaactcacgcatactatcggctaggttatcgaagtttctggctccaccctttgttccttttatcatcgcgtttgcaatttggccgcctgtgagcttcaagtctttaaaggtggaactgtattcattcatcgtgtctaataaatcatcagcctggtcaccggcattccggtatacataagcaattaagtctccgctttgtttcccagacaatttcaagttgttatacattgaactgaaagcacgatctacctctgcctgatcagcattcataagctgggcaatcttacttgatgactcagtcaattcagccagagcttttttagacgcccctgtctgttgcgataagtttcttagagataaactgacttcttcccgagaactgcccgctttattgttgaaatagatctgatccgtcatttttgcaacatctttcttattaacgtttgaagttgctgacacataagcatcctgagacattgtgcttttaccagaacccataattgaacctgcagaaaaaccacctgcaactgccagagtaatggtagcacccttcaagctgtctattttcgcttcaatagcatccagagccgctgaagctctatccttaatagaaacagttggctctgcatgttcgctatctacatcagtcacatgacgacggatctcatctaattggttagaagcatgatcacgtactgaaacagttggctcagcgtgcgagctattcaaatcagtgagacctccacggatcaaacgaaaacgtggtgtagcttgatcatttacggaaaccgtcacctcatgactgccttcggtaagatcctctgcttgctggcgtatagaatgtaagccattcgaaactcgatcatctaaacccatttcaagcaatcgagcccgagccgtcaaacggttggctgatcgatcaatttgccgcataactctttcagtccggtcttcagcctcaaaaataagagggccattagcagccctcttaagtctttcagcattgccttgtatcattcgaagcttgcgggaaatcttatcatgtaattcaaacgtggctgttagtttagccatagttaattacctcccttcttcgcttctttttctaacagctcaagcttaaaaccgattaatccatataagagcgccttgaatgctttcggagcctcatatagttctcttaattctgacggggcgtatttgagctcatgcatagcatagtaaaggtatacagcctctttgtccccgtcttttactagttttttgctgcttcttcaaggtcttcgagatcatcatcaaaaccgttgatttcaattgctttgttcagccaatttgcatattcaccgccgactgaaagaacacgtttggcgacttccactggatcttctgttttgtaagcctcacgtagttccttagctttaaagttcggataaacagtcgtttcaaccgcaatacgagcataaaagcgttggctgtccaactccttcacacggccgcggccttttacatttttgtaagtggtgttctctttctcaagttcgtcaattcgttcagtcgtaattgctttgaaaatgaatggaacaacattgccttctttgtctacaaaccgtttagaaatcggaacttctacctcttccgcttcaattgtttgtcctggcataaagaatgaaagatcgtatactttttcgttttgtttttcactcatgtttattaactccttttactttttagttttggacaagaaaaaaagcacattcatactttttgaatgtgctttccatataattcatgtataatagattcttgaagctaccttagcttatcctccgaatatgaaaggaggtgaaattatgtcgacctatgaatctctaatggtcatgatcggctttgccaatttaataggcgggattatgacatgggtaatatctcttttaacattattattcatgcttagaaaaaaagacactcatcctatttacattactgtaaaggaaaagtgtctacacgaggaccctcctattaaagggtagtttcttttttaaaagctagagtgctgccacactctggcttttatattttagcatttctcatgaaagtaacacacattaacaagtggtaatgtggtaatgtggtaccaactataagcttacgccagtagttgcaatacttttgcttggcaccattataacatgaatatatattgattatataattatttgtatcttttatttgttactttttttatctatgagttcaaaatgacctgatcatagaagccttaaccctttttcttttattaaaaaccctcggattatgaaagtgttatggtacaatatggtttagtataaatgaatattggctttcaacatctcaagggcggtctggctcactccctcatgaaagggggtgatgcacgtgtcaacatttcaagcattaatgcttatgcttgctttcgggtcatttataattgccctgttgacttatataaagaagaaatagacccaccccttgagctcggcaaagtaaaagggtaaagtctatcctaaatactttcatgaagttgttaagccagccctcttgatgggccaacatttatactgacccggcggcaaccgggtctcttttattttatgcatttcttttgaaagaaatacatgtttccatttggtacggttgaattacttctaaagtaatcttaccacattttttcgtaaatatcttcgttaaagtcggcgatttttcgtgaaagtgattagaatgtggattttaactgttcaggcacatcaaaatcctcaaaggtaaacggcacttcttcttccaatgcttcagaatcaacatcaagcccagcgattttcgcagaatcaaagttcacatcgtacaaggtgactcgttcagtcccacgacctgaagaggcgtcatctagaacagcttgtaaggtgaaataaggatcacttccctttttcacatagtccatcataataagaacaaattgagaagtcactttataaaaagtggctgttcccgttccatttgctccggtcgttttgtgccccgtcatccgacgacccatgatattgacctcggatttgtttttctctacattggcttcaaacgttttgatatgggccatttcttctccatcaagaaacaacctgccctctttacctgaaatggtgttttgcgcttttaatgccattcctatttcacctcaacattaaagtagaatttttcagctgcatccaccggttgaactgcaagatcaatcaggaagccgtcacgatcattattcagagcaattgtaatgtcattctctgaatcaaaatcagtaatgccctcgttatcttgaagaacactcaagtattgagtaattagcgtttttacaaactgcagtccgtcatttgtagcgggaacatcactgccgctcgcttttcgagacttgatcaatgctttcaattgtgatgtcaggtcattattgattgcatcaagtacacggacaattttgtttttctggaacatcttatttttctctgctgttaggcttgtgagtgaattaatgtccttttcaaccgatactgatttatcacgagaatcataagtaaacaagaattccccatttgacaatcgttcaacgatttcgtcgttgtcaattcggttaaggacatctacagctccctcgtattctacaaatgtaagtgattgattaaatgtagcccccgcacttgcaccggcaacccaagctgtagctttttcaggagtgatctccgttccatcctcaagtaggacaccacctgttacattgataataccctcatggtctcccttgtaatttgaaagaacaccttgaaccttttgcccttggttgtctctcagccgtttgataaacgcaacaaacgttgcttttaattgctcgttatcctctacaggtaaagcgattgtgtcaaagtattccgtttcagccgcttccaagaaagctgtataatcggcatttgtcggtgttttgtctgttccgcctgacaagcggattccggaagttgcagggagagcaccgctaacatcttcaggggccgtaccggttaacggaatagtaactgttaaatctcctttccccgtaaacgtgacatatttattcggtttaagttcttcagctttagacactgtttgtttatccacttcagattgatcaaggtaggtagtgacatcaactttcgaagagtcaataacgttctccgtaatactaataatgatgtcattacctttagtgccgccataaagagcagtagcctttacaccttcgctaatgtctgctgaagcacgaagaccttccgttaggcgataaagcaagactgtattcgccttcttcatcgcctcacgtaaaagcaacagcgaaggatcatcaatgttcaaccccacttttttattcaagtcctcgattgaagagatagaaatgaatttcttaacctcaccccagctggacgctatcggcagcgccactgttccacgttctccggcagaaacacggttctccgcggtcgttttgaagttaaagtaaataccggcacgctctttttccttgccaggtgtgaaagttccgccgttcatctatttgacctccttttgaagaaactgagaaatcaacttcttcgcttccgattttgtaatactcattttatgaacatgaaaaagagcaccgtcaaacacctcgggttttaccccaaagagctctcgactgtgctctcgcaaatccttaatataaaaagcattttctgctttctcttttttagtggccatcatttcaccccacttttaaatttaaaaccatctattgaacgctgatcttcccgctcataccaatagcggctcgtccagtttaagacaatggtcgcataatcgtctgatacccgcgtttctattcgagataggcgaataaaatccccagtatcctcgccagattcttgtataagcggaattatgcctcttctgcttctaagtgtatccgcaattcgttccgcttcgttatgagccttctgtacgttttcgtgaaagagttttacgtttaaaacatatgctttctgaaacgtggatactgtgtccaccccatcgaccgtggaagccggtggaaagtaaagagacggaacagcaaagtcctgcggtatttcttcttcatacacttgaacaggatacagtttgtatagatagcccataattgaacctacttcttgattcatggcagcaccgccttaaaattcttcataaatccattgctgcagcttccgctcaaggcttctctcaaacatcaactgaaaaatggccatggcgttatcccaaaaccccgaaccgtctacccatcggaacttcagcagcatgccggaatttttttcagcagggtcatattcgaaacggtcgcctttccaccgacctggaacccatcgtctatcctgatttttagacggatcgatagtaaagtgcccgtcattgacgtatgaggcgtaatccagatttgttccaacatccaactttaagctgccttctgtcattgaaaagatattatcctggtcacctttctgaaaggaattgagcaagcggcgagtgtccacggtcttcgtcctaatgatctcatcttggatgatatctaagaactcaaaacccattgattcaagccactgctcatatttcctcttcagtcccccacgagaagcccggtctaatgattgtatgaactgatcgagaccccgaattttcataagtattcaacctcccgtactgccgtcacttcccaatgatgattcctgattttgcggggcttctgtaatttataagcagtaccatcccaaaccgccctgtcatttactcgaatatcagcagtagcagggaaatgcacaaggaaagattgataaatagatacatttgactcctgttggataatggactgactcttctctgtaaaataacacggctgattttctatgtccggctcatcagggtacgaaaaaaccggttgaacatcttcaaccggcaccccgaatttttgctttctattttcttttttctcctgcagatggtaaatgtcacatctgtgagtcaataaggattgataactcatattgatctcatccgcactttcgcttcaatcccttctaaatcagggtcagccggtttcacataatcttttattaatgcatacacatcaggtttttgaagagaactgccatcccctagagtataagaatagtcaccaattttttcagttgtatatcctttaataattgactcgtcgccatttataagagcataaaactgagacaactttaatagagccagtcgaaccgtttcaggcaaagggatatactctgcatctgaaaaatcatgtccaactttaagaatgatatcggcagttgcctcaaggatatcctgttttaacaactcgtcaggtctggtctttacagactcaaaaactgaataactctttaattcatcgggagtgattaacagcataggtcactcccctttgttatctatttgcttaaggatgtaggcaattctttcatctgcgtttttgaagtcagacggattgcgaccaagattagaaataatggattcatgctctgctttattcatacctttcaattccgattcagtataatttatcggatcatccttttgattattaagctcttgggttagtataaaatatggattttcatttaaatactcatagagctttttcggtactgtttgactgacacctgctcgaaaggttattcccatcacattgtatgttttgcctttaataagctttgcagtaaacacaccagaccacctactccttcactttcacgatcttggctacggcgtcctcttcttcaaaaacactatccaatttcgctgtcaaaacaatgataaacatacggcgacggatgtccttatctacttcaatccgaatgttacgagagaatccgagaataatattcttcggatgagttaggatgatatcagaaacatcggctgcagtatctccctctccaatcgtataaggctgtaaatttgcaatacctttgattggaacaccaaaagcagatgaaaggccaccttgaacagctgcatcccctaaatttgtttgacgatcagctacacgatctttccattcgacctcaataccaggcgatgtatagaaacggaactcctgcggaattcgcaaatatttaggaggtacagctttgtatcctcgtttaaatgtttgacgtgtcagttcctcacctgcagcatcgacaatatgagatgtagcttgttttctgatgccatctaattgtgcaagatatgagtcggaggaagatgtatccccatttacaagcaactcttcaatatcaaccgcagcacgctcagctatcatttgcatgattgtattctgaaggccatctttttcgatgttgttttcaagtgtgtcataggtaatgttaacttcagcaattacttcttttgtgcttaagttaactgtgctagttgatggaactgacttttgatctttagttagcgcaactccctcttgggctgcccttaaaatacgctgaccaaaaccgatcttctcgattttctgtgtgtcatggtccatttgaataactcgcgcatctcttaaaatggttggcgtatcttgtaccattcgaataaaagttgaagcctgagtaggattcataatcccgccgctctctaaagtagaaagcgtcatttctgctttattaataacctcttgatttctcattcgtatcctccttatccattaaaacaaccctgaccagattgatttttgaacttgttcggaacccgattcttcagtttgcttagatgttccgcgacttttttcgattgcttcaatacgatcagcgagcggttgaacagcttctgaaattgcctttttcaacttctcgccctctttttcagtctcttcttctttttctttatctttcttattaagctcttcctctttttctaatgtctcgagccgcttcttaattggctctaatgcttcttgaatggatttagttacttcctccgaagtcatttcttcttccccctcttttgtttctacctgactcagtaaattaccaagggcagcatgagcattcttaatttcttgcaggtttgaagcggaaaattttctgcccgcctttgcaactggctcttcatatgattgctgttgttttccaacaaaaaagtttttgagcaaattaaatagccctttctcatctgttttctcttgagaaacgggcttttcttgtttttcaatcgtctcagcagttcctgccattgaataaccggtaatttcgccttttttgatttgctcccatacttcctcagaagcctttgtgacaaggacccatgatccctttttaatggtttccccattcatttcaaagtctgccggtgcgacataggactcaaccacctcaccaacaccaccctgaaagtcatgttgcttgtcgatttgacgagcatctttcaggaatccatgagcggccttttcgatttctgcagctgtcatgaaatctccgtgggcgtccactgtatcaggttcatacacgataccgtaaacaagtttttgctcgtctgcctctttcgcaaggattctgacttccttttgaaaatcaggttgtttttctgatttcacaataaagaactgcttttgattagcagccttatccacataagaaacatgtgtgatttttgcgttcaccaattctcttggcatgttattcacctccttaaaataagaaaagacttctaattagaagtctcaccagctgtattctcagcaacataattgcttgttatctccattaacctttttacactcttatctacattccagaaaaatttattcataatgtagctttgtgaaatatgacttttctctaagtcatgaactatattcattatatcaagtaagctttccgcaaatgaatcattaagaattttatggcgtttcaaataatcaaccatgtataacatgcctataccttgagatttatctgccgcatcatctttttctgatactttttcataaagatttttcactgctccatataaacgaatcatttccatttttagtagtaagtcattatcccctttaatgcttgtcttctcattataatgggaatgtgtttcctcagtgatttcagaattactttctaaatttaatgaatcttttagattttgatcatcagttccatattgattctctttattcaattggaaactaatcttatctaatttttggtcaatagtgaattcaaattcccaatccttatatttaattttcgccaaggtactgatcaaatttgaaaccggttgttttaatttaaaaaccaagataattattgctaccggccaaatgattgatttgactattgaagagataaactccatccaattcatattttccccacctaatatgtaatgaggacattatactattttattccatgtttgctaagacttctctttgaatctcttctttttcttcgggtgataagcctaaaatcttactatctaccacaggcgatagaacacaatggcagttaacccgctcccttgttgatagtttaggatccctcggaaacatgcaggtttcgctactgcccggtatctgaaattcttcatctactccaatgactgtaccgtcaagatcaatgtgattttcacgaggattgttcttcttccctccgctgtgccgccatttctttttctttactgccggcgattgtgcatatgattcatgctgcgcggcagaggaagcggcaagcacttctgtgatggctgtggtacgcgcccgctccctatcaaattgtggcatgtctttgagagtcaactcaatgtcctggattgatgaaccgttctcgatagcattagttagcacgtcctccaccacttcatgtgtgtttaacttcatgatctcagccagcttctttgaccaatccttaatccaattaatcgtacgattggataagactttaaaaggcacctctggatctattgaatccatgattacttcagccatttcttcaatagtctgttgcaggaatccctcagtcagttcctgaaattcttcctcgaagtcatcctccgcgaataggttctgagtaaaaaacactagaagggcttttaacgtctcttctgagtctttgcttacaaaacctttgagaccatctaaaaacttcttatgctggcgtctgagcaatctggcaatgcctttttcatattcctccacatatttggggatattagatttgccaggaaagtcaggtaccatctcccccaattgcttatactgattttcctcggctttttgaataaagacatttaaactctccaatagcttatccgttttgttcatctcttcaaatcctccagaacatcccgcatatcttttaataacccgatcatattaggagtaccgttcttagatttaaacagtgcagccaaaggatcggaaacggacgactcgttagttttaccaagcggcctgttgtattcttcttctggccattcttcaagcgtcttaccaagtacccgtccagccaaatcgcgtaaatcattcggagaaactgcacctgctgttataaacggtgttagaaccttagcaatttctaaaggatctctaaagtctggcccttttagttggagtcggactttatgaatttcaagatcatttagaaataaagcattcagtttacctgtgattaattttcgttcaggctgaaatacttgttcctcagtaatctttcttgctgtgtcagctgtcgctctgttgtaatcttgagcttcacctgtataaagtgggggcaaacgaaaagccgatctaattttatctcggttcttttggtcatattcaagaaacaaagcatcttcttgaaggatttcagcaagtgacttaatatcaactttcactggtgcaatctcttcatcaccatgaatgtttttccccttcgctatcccttctgcttcaagtaatagaaacttatgagcgttctccactccttcaagcccattcatgtaatcctgcaattgtgtgtatgagtcctcagacaacattccattttctattgtgatggcagcgggaatatgtcttccttgtttgaagtacataaagttcagctcttcagctttacgagcaccatacaaattaacaatatggccaatccatcgcggtttcccataaataccgcttcctattttgaaatggaccacttcatttgctcgtttctccaatggggtctgttcatcatattgacctgtctctaaatttaaagtgcgaggatcaccatattctttaaaataaaccatacggccgtcaatcatctgaacatactttcggaatcgtttctctcttttgattgatttcatttgtccttgttcgaagtacgtaaaatcaacttcgattggttcagacagtttgcaaactcgtacattttgaacgtccatgtattcaatgccggctggcttattttcaccgtttcgaatgacctcaataaagccattgcccgtcttttctctatcttcaataacaaatccgagtaaagtctcagctgactcatcaaagtgaagatatttaacgaactcttcaagctttgtccattcactttcagcttctgttttttcttcatttgtcacatctggcgaattcacatcaaaagaatactcgaaatcaaatccaaagcccacaatatttgtcctgtaggcatcaacacattgctgtaagattgttgaatactcagcaatcatttttaattcctttaggttatacggaggaggcaaaatattgctgtcatagctgtcagcaaattcatcttcataaatttgtttcgttgattcagtaggtggagaggctttgatcactcgtgctttaacagatttttttgacatgctttacctccttcctggtcttgatctttgcggtcttccttttgattcttctttcaaatcggttacctcataatcatcgagagcgtaccagatagctgacagtgtatgcgggtctatggtgaactcgtcttctatgatgttccccagcttatcggtagcataagcaagcggcttaagctcataaatcgtgttctcgcaacgatcagagcaaatgatcttcctgaaccgcttgattttctttgtatactgaaggcgtgatccttgatatttacgggcacccaccatattgaaaccgtgttgctgaaaataacggattgtctttggctctgctgaatccgccttgattaattccttagtctctgcaaattccttaagttcttcggctgtcttatcatccgttaatccatttttgtaatactcccagtagatatagagatatttcttttcatgatccacagcaaccctaacgacggcgttatacgattccacaaaaccaaagtccatgccaacccgtttaagcgggcggttaatattagagattgcagtcataacctcttcatgcggtcgctcttcaaactgcggcagaacccgaattccattcacgccaaaatgacctttccgcgcaattcggtaaaggtctggatcgtattccttcaattcttcaagttgctggacatagctttctggcaggaaaagattatcatctgccgttgagtgatgataataggtgtcgttgctaacgattatccgcttttcataaagttccttatcatccagtacaaagcgcttctccctatcatccttgaagaaatgcttaaaagtccaattgtcctctccaactggatttgttgaaagtatcatgtgaagcggcaatgtcgggtgacgaagacgtccaagaagctccttgaacccctcatattttacttcagagcattcctcaatccaaatgagggaaatattattgattgatttcagtttggctggcttatccatccctttaaagatgattctgctgccatttgaaaatcgaatctgcatcggagaagatacacatctaacgatatgatctaattttagatcacttacaagttcatcaaaaagtgaaaatgttgagtccctatgtgtgtcgtacacttctctgataacaagtgcagtacgcttttctctgagcaatttcagaacaatcttgagcgccacatgatagcttttggatgatccataaccacccacaagaaactgaaacttttgattccagtcaaagagaaattctttaaaatgtggatttacctgtttaatcactgtcatcacctttgtttacaatggtgatctcaaaaggtttatcttcttctgtaagttcttcgatctctatttttttcttgttgatatttaagcgcatatgctccaatttaaggcgtcgttcgtcttccgaatgggctaattcatcaaactgtttaattaaattcctgagctctgccattgcacgagattgagcgttcaagaacgttgcatgacgatcccaagaaaattgaaattcgaattcttcctcttcgacttcgtttgtctcagatagcacagactttttctttttcagttctttaatcatttcctgcttatcagaaacgaacatgatcttttgcgcccttattattgcggcatattggatctgtatctgatcccatatcatatcgacaggcgaacgttcttgaatcccttccatgatggatagcgtttcttctggcaggaacttagagaagaatccatgagtcacagcgttttgatttcccttaggtgcgccgccattattacctaacgcattcttgttaccgagtggtgcacctactttttttgtgtgcacacctttttttaagggtgcacccttttttctttgccaaccatggcgttgtttccacgatttaatggtgttcacagataccccatatttctcggcaaggtccttgtatttcatacctttggcgtaatccttatacgcctgtatgtgcttatcaaccatctacattcactgccgcctccttttagattgagttgttttgaaaataaaaaagctcctcaaaagaagcttaaatatgtttttttattaaattagttatttcatcaatcaaccgctcaatatattcttgattgaagttcacctcaattattggatcatcgttcataaaacctcttaatgccacttcaacttctcttaaataatttatatattcctgtaacttgatattcagttctttatcaaagagtattgaaaatttcttaacaatcagttcaaatgccgatagctctttaaaataatcagtatgtaatttttctaagtatccttctgggtgattatagaacggtacaaaggcagcagcggtttcaattcttttattgttaatattataaatctcatcaattagtatatagccttttgtgaaaatttcatttccttttctattcttcttttgtaaaacataattagttccacctgtaaaaaaaactgctgttatagcactagtaatgactgtaccaaaatctatttgaatcaatttcatcccctccttttactaattatcggcaaaagagagcgatacaggtactattcgcaaaatttgtcgaacgaaactgttgtataaaacctaaatttagtggtgacgcaggaataattcgccgcgccgacctgcctcccattttacactacagattttttcagattcaacaaacgctcaaagtggcaatcttggcataattggctgatgaactcatctttcattttgcgtacagtttcccttgaaatgccaaggtgaagacttattgcgcggtagctcataccctccatcatgcaatcataaatgactttatgctgctcaccatggatcttttcagcccctaattcaactgcatatactcgctcttcataatacttaagacgtttgaaaagacgttcctctctcatatccatttgccttagctcagcctgactcttcccaggacttccttttggcatagtagcttctaatccatattgagcaacaccccaattcttcatgggaattactgaaccatagagtaccctttgcaatcgacgaacctctttcaccatccagtgatagctattgattagattttcaatttcttttcgattcatgaaagtatcctccttttcaaaataaaaacggacaccaaacatacagcgtaatactgtaagttcagtgtccgcaggctttccgtcttggactaactggatattttatgctttaatgaattcacattacctaaggaaaaaaattcaactccctccttaaatatggtaaaattttattataaagtagtggaggttgttatatgagagttagagaaataaaaaatttactcgacaattataataaacaaattggagttagtgtttcgcacgtaccgcacagcaacagaaagactgttcttaatttacaaaagtctttagatgcaattaacgagttgtctaaacttggttttttagatgatgatattgagagatttaaagatctaggaagtatatattattcacgtgtacctgaagataagattgaagtggataatcacatcgctaatcaaattactaatcatataaaaattgtaaaagaaaaattacgtggttttggaattttaattgatcagtcagtttctgatcaaaatgagaacgtaattagcgtaaaactccctcaatacaactcattagaagaactagaaaaattcatcaaaaaattaaataatgcatttcagaatggtattacccttgaggaaattaatggacattataaattacagggttttgacacaggttcaatgtggattgacatcttagtaaacagttcagctgcagtaatatttgttggacaacttatagatgcagctataaacatttcaaagcgatctcaagaattactcattactaaggcaaacatcgaaaagctagctcttcaaaatgagcaattaaagctacaagtcgaaacttccaaagctttgctagatggaattgaaaagggtattgacacaataacagatgccgaaataaaaaatgttactgaaggagcaaattattcaacagaatcaataggacatataaaacaatcggttaaaatctttgcagaattactccatgaaggtacccaattccacccatctttagatgcaccttctgaaacagttgaagcctttcctgaaccccaaaagaatttagaagagcctcaacaattattagaaacattagctgacaatttacctgaacaggaataacctgcacatccaagccgaaggaggagatatcctccttcttgtttacctttttataaagtattatatcttcttctcatttcaccttaaaccctatctcatgatcaacccttgcaaagctgccctttacagtttgaatcactgttttgccgtgctccggagcatctaaaacatgtgcagttccctgattcccatctaaaacaatgatctgaacttttcctgggtcaattttctgctgaatagtgaagtcttttttgatgtttatttctcttggattgtacactcaaagcgccccctatgttatgatagaagtaccagttcatatcaagaacactgaggctaagcgcttcggtgttttttatttttaggcagaaacctctcttatcatgacttccacccttggctcttcgctataaaacttactgactttcaaatccacaacctgactatcatctttgtatatcagatgattcaaagcatctttcacgccctttacataattatcaacgtcgggctttgtagtcggccgcagaaggcccttttcagctttctctttcttcttttttgagtttgaaactgacttaggcattggtctgtacactttgacatccattgagacaggaccagtaataattgtttctggtcgatgctgagacgcaaccaatgccacatactgtttgaaatactttgatttcgctggatcacgcatatgcaccttcccatttcgtattgatccacgcggccttccttgtgcgactggctcaccataaacagtgaacttaatgcaatccaactgttctttacctcccgtcaagctgttcccataacttaatttctttttctattctcggtgcagaaagtaaaattatcagcagagacacgactgctttaagcactcagcatccgctccatttgctttattttttcctcaagtaaacggattgttggtgtaagatctttaccttcatttcgatttgaagggccaaatatataaagtccaccagttgcttttatattcgttttctttttcattcccaatcacctaacctatgatttaattgcattcgatcgcctctaataatcactatgtaatcacggcacatctggtgaattcgtgaaccaagagcctcgtctatatccaaaatctcatcgattgttaactccgaagaaatcagcaaaggtttgtgatttaaataccggtagttcaagactgactggatttgttcaacctgccagtctgttgcccttggttgaccgtttattggtttaaataaatcatcaatgaatagaacttcgacctttctcatggcatcgagttttgcttctaagttatcaaagttagctttcaaatcacccatgccctctacataagggaaatacatgcagtgtactgattttttcttgatcagattattcataatcgccgtgagcaaatgagttttaccgctacctggctgtccaagtaatgcgatactgttttgcctttctcctttgatcttttgaaaatctttatagtattccactgcacactcataagcgtccttgatcatgtctggcttaccgtccgttatgaagttaccaaagagaagcttttcaaactcttctgtaatgccactagctgccatgagtctggcaattttctttcgtcttacacattcacactgttttgaataagtatctttccattcgctagctttatccggcgtacaaaccttacctaacagaaaatcatcttccgacaccatatcgtccggaaccataaggtctaactgttcatctaaatgccaagaagtgtccttatggactcgataaacgacaattccacgatccttacaataaggacaatcaaattcagccttttcttctgatacggcctgttttgttcccaaaaagcgggctgacctttcccgaagttcctgcatgatcgtttgaaatgcggtgtctatactgactgctttgtttatagccatattgtttctcctttctcttttgagtgaatggatttgataagatggcttgaacatatgacaaacttgcagctttcccctttaattgaaacgctgtcttgatagcctccatcactttttcctcaccataatcgtcgaccatgtagccgatccgctgtgcctccatcgggccgactgaccgagcaactttgttttcatatagctcaaaggcatttttcattttgtcatcgacctcctgatgttcaatctgagctggttccaaagctttgttcttcatgtaatttcctagttgtatgtagtctgcataatgaagtatggtgacgatgagccctcttttttgtggaagacggtgcaatttgatatatccctgtttctccattcggtctagtgagtatttgatctgtgcagctgaccagttaaaatcttttgctagttccacaactttgataatggtctgcccaagttctagctcttgatttggcctgtattcagctcttttgaacaagtgatcataaattttttcatccctaaactctttgaatggtagtcggggtatgaccacataccccattgcttttatgtccaagtcaatcacctacttcctttcacagagtgcagttatgtcagagatgccggctcaatcaaacggaagttcatcgtcttttatatctacaggcttgccgtcaaaaggatcggtttcttgggcgcttggtttttccgtttcatctttgtttgaaggctcggaatcgataatttctgaactgtctgcctcattggtaatgtcaatccgttcccttgtttcatcttcctcaataactgctttttgcatttcaacagagagaatcccccacttgctcaaaactgcttttaatacagtcttaagagccatcgcatcccagtcatttttccatccaaaatcagacttactgaatttctttttgtgcttctctacttgtgcctttgtccagtacactgtttttcggaagccatttatcaactcaaaataagctgcataaccaattaccgcgtctgattctcgtttttcaaaatcaatctcgatctcctcagtcaacggattccacttctgcaattcgccttcatgaatcggtatgcaattgatggatttatattggcctgttcgtaaggctagctggatatatcctttgtatccaagctgaaattgagccttacctccgtaaggaacaatccaggcataccctaagtttttatctataggtaaatcgagtgtagctgccaccattgctgaggatatgacgctcataggatctgttttctgtagcatctgctcgctgttataaaggcttaagatagaagcagtaaactgtgtagccctcttccctaacacttcctcaaatcgtttaataacagatggtgaggaaagtagccctttcattgttgctccttgttgttgcacaggtacgtttttttgtttcttttggatgttgtttttaattgattgattagtagccataatcagctaacctccttgattccaaaacgtctgaaatgagtttcctttttaactttctcgtatacatccggaaactggtctttgagctttttcgtgtcaattcgatttgagacaacaggcttccagcaagcttgatagttaccgataaacccatactctgcatccttcatttcatgtttgatttggttctctaattcttttgcctggctttgaagctctgagatctgttctttaataagcaagtattgttgaatacgttctcgattagccgcagttaaatcaatagctttgttattttccgtttcggcatatcgttttttgaggtattcctccgcagcacttgaaccatctaaagcaggagcttgtccacctaagaccttgtcattccagaactcaatctctgctttaaagatcatgtcaattaactcgtcgtctcgctcaatctctttccagacaaatttgttcccgccaatcagcacagcaaaataagctttccgatattcaggtccaagcacacccagataatgctggacctgaacgatatagctctcggggatttcttcgtcctcccattcttttaagttgtaggctgatgttgttttacattcaaggatcgctttttcaccaacgatcattcgatcaacattagccaaaatgaaattatattctggatgtctgagtattgcttttttacgtctaaccttcttgccactacgtatctcaaattcttttgcaacaatatcttctagcaatgatccaaagtaagcagcttcactttgcgattcactaacagggacctgtcctgttttgtctaaccataattcaaaaggtgtcttccacttgttcagccccaagataatggatgcatctgagccgccaattccttttcttctttcaataagccattcatcacggctcatttcagaattcttagcaagaacctcagcccgtttgcttgtcattccacctaacccccattgtttttattgaggctatctgataaaatatttgcacatgagtttttttagatagcctttaaagaagtccactttgccgagtgggcttttttattgcgcgtttttaaattcaaaaccaagttgctcccttagatacctttccaagttctctctgagaatgatttcgccgccatcaattacataatcatcaactggtgttacttcatcaccgtaaaaatctatttgtacatccgtttcagtcagcttatcgtgccagttgtttatgaccattggattttcgaccattcttattctcctctctgaatttgtctgcacgtctatcccataacagatggaattcactattgttacgaatcatcacacaccatttacgaacttccagagcagttgccggtttatgaacaaaatgaaccatcatcctatacacctgctcactacagttaagttgataccttgctgttgcattttcaatgccgtttcataaaggcgtcctttgtttgcaagccggctaatatcctcagtaagaaccttgatgcttccagcaagactaatcgcttcttcataatcaccatcacgtaatgcctctgacagcatgattgatagctcttctgctgattcgatttttctttttgcgataggaacatctgccttcaagaaatgattagtattcatactgaaaccgcctgccttccttcttgttttgccatagcaacttgatcaactagagctttccgcgtccatctatctgcaagttcctgcattttcaacccgtgagtacgaacaagtgaataaatcaatgttttgttagccgcaatcaaatcaaaaatctgcttaatatcggccatcggcagctcctctgttttacctggtcggttatccgtgagccaacgggctaaatgtttggttgcttgcagtgcttcctccaattggtgaaccatattaatcaccgcattacttgcacattcattgagtgccggatcaataggagcagcggctgtaggatgaagtttgaataagtaatgtacaagatcaatatgttcataggcagcgcacttctcaaaccatttaatacataactctggagtaagcttggcaagtccattttcaacatctgaaacatacctttgatccttacctccgattaacttgccgatttggtattgtgaaagacctgcagccttacgggcactacgcataatctgcggtaaattacgcatattgtatgggttgttctccatatgtttgcctcctgttatattaggtttttagttttaaaattgaagttgaaagaccatgctgtttataaatgacttaggctgattcctttttatttttttgcgcaagcttctcttggtgttcattcatacgctgaacaagtatgccactgaggtatttgtaggctttggcctctgcctgttcaaacagtggtccttttttcaagatgactttcataattaaaaggcctcctttgtgaattctaatcatgctgaatccttagaattatgtttcgtttcgttacatacatcctcaaaaaaaatagtccagtcaaagcctaatttctctcctattttttttgagacaataacactaggcttcctagtaccattttctatcatggtgtagtatgctctaccaatctgtgcagctttggcaacttcttcttgagtaaaccctttttctaagcggtttttcttaagccattttctcatcatttttcacccccttaatcagaaaatgtaacgtttcgttacttagataatagtatcgattcgttacattgtcaacacattttcataaaaaaagtatcgttttgttaccaaaacttatatgtaaccctttgttacgttacaatgagatatagaataaaaacaaaagtcaggtgattaatatgttctccgagaacttgaaaaagtgcagaaaacaaaagaaactaacccaacaaaatatggctgataaacttggaattactcggcctgcctacaccgcctatgaactaggtagtcgtgagcctgactataaaaccttaattaatatttcaaacatacttgatgtttctttggattatcttcttaaaggagaaagcaatgaaaaagtatttcaggatgaagcaaaaaaagtgttaaacgatcctgaaacattccttgcagcaaaagacggtgaggtaacagatgagatcttacaggctgctttggagattataacggagcaattaaaagaaagacggaaatcagataaataaacgcagttagtttattattatttatttctgtttattatgtttaattctgtttactaataagatttagattctcatttatatttcattcataccctcatttaaaaagtgattttgaatcctttacaaacccttacgtgacaagggtttttgttgtttttctcatttatattttcatttatgtttcttttatattctcatgtaaaaaaattgagcgtttattgtgagggaaattgcagagtatcgaaatgggaaaagagggcttcttgttaaaaaccttgcaaagtgtatgtgaaaaaaataaacaatacaattatcgtaacaacaataattgtttctttaataaaatttttattatcttcattcttttgtttcttttttttaatctcttctctgtattttctttgaacctctttcttcttatcattatttttcatgattaaactcctttgaagtccatttattcccttgcccctatcatttgcaattgtaataattcactaatgattacaccaacaaaaaaggatcggcaagtgcttttcactcaatggtaaccaacataagcactagctggacaggttttaggatgtatctaatcgttgaggttccatttcctgcaactgatccaaaaacttccttatgaagaacaatctcttctctgttgtggggatgctaccaaaaatagtaggcaaattgatagcggtattaaaaaaacagctcattaaatgccatactggaactgtctttgatttttggatttattttctgatgcagctattgctatccgttagtttaattagaactcagataatccaagacacggtcaactctttcattgactgagcagtcgtcttcaatctttaacactggacaagataaatctgccatccaatgttcatgcaaagctctacttctaacttccattccagcattatcatataaagaagcccactctaaaaatgtttttgattgttcatatttactgccaccggctaacacttcgtttccataacgctgaaattccctgtgccttagtctctcaagccgtatatcttgtggaatccataagaagacgacaaggtcaaaataactttttagattatcgccccagccacacactgcaccagaaagaatccatttttcattgattgttaagtctttttcaagcaactttcttctttcaggaatttctctttttttagtgaatttgtctaaccaatagtaattatcagtatcaagatgcgtatgaggcaaacgctttgataatgcagcacccaatgttgaagttccgacaccagaggctcccaatatgtgaatattttttttcatacttcccctccttattaagcaaccaaactccctgtttgttgcataacgtacttactattattttgacataaatccctaaaagacctttacttttcgagggaaatccagatgcgtgttaaaatcataatacttacgaaaacagtcatgattaaacggattcatattccatctccttagacgcattttcctatgaaaaaagtcttgatttccatataatatttaaacgaatccaatttttagattgtcgtctttaaggaggtttttcatcttgaggtatacaaacagtcatttagaggattggattgaaaacttatacaagaagattgatattacagaaccagaacaaattaattttgaacggattgccgaggctttagatatcaggctttcgtttaaacctgttacaagcttcgcacttaaacacagcggaatttataatatatgcttggacagccgtaaaagccgaactgaacaatggtatgattttgctcatgaattttgccatatatatagacatgaaggcgataaaaaaacaatgcctgcaacttggactgattatttggattggcagtccaattattttacatatcacttttgcattccaacttgcatgttgcgtaatatcaaccttccgtacatacaatcacatgcaattgaaaatgtagcttggttatttaaggtatccccttcattcgctaagaaacgtttaagcatttattacaggaaactgactcaacatttatttagtcaaactgttacgggaaatttatgccccccctttttgtaatgaataatgaaatcctcatgcatttgcgcgcattgaaaaaaacaaaaaaagacgtctcccttcacgatccgatcgggcaggataaggaagggaatgaaataagcctgattgacgttttgaaatcagaaaacgaagacgtgatagatacgatccagctcaatatggagcttgaaaaagtgaaacaatacattgacattttagatgaccgtgagaaggaagtgattgtcgggcggtttggacttgatttgaagaaggaaaaaacgcagcgagagattgccaaagaactcggtatctcacgcagctatgtatcgcggattgaaaagcgggcgctgatgaagatgtttcatgagttttatcgggcagagaaggaaaagcggaagaaggcgaaggggaaataatgcagaagaagccggatctcatactccggctttctctatttgaaagagttatgaaaatcatttttttcatcgctgataagctctccgagaaagacaggcaggatcgtaacaaataacttgacttataatcctcccgcaggcattcaaagccggacgttctaaaagctctcctgagaaaatccttagatcggtatacttcagtacatctttagtccctgctttctttatacaggcctcgatctggctgtcgatgctcgatcccttgatcgcttgttccacgatatattgctatcaccctggatctcctgcctataaagttttattaaataatgatagcaatcgttcatgcatttgtcagtttgcagtccctcgatgattattaccttcataaaatacatcaccccttgggtaatgctgcgtaatacctgtttgtcctaatgaggtgattttcaatgagtatgaaaacaaataaaaaaaccgatggtttgtaccatcgatctgttttctatatcactaggccctcaatatagtaaatctagctcattggttatgaaagcttattttcattacacactatatattcatttgttatcatttctatacgtttatatcaattatggtaaaaaatggttacaaaaacccaataaacgtccaacctaactttttcatcttatttattaagaattttaacctcttccttgtgaaataaagaagcgattttcatctccaaacagttaatgctatttcatcgggacatgtctgttaaagtagccaataaatacattcggatatccacttacaaccacgattcaatttgatccactacagatttctgagctgacattaaacagatagagttataaaaatctgtaccagttccctttcacaattaggacatttcggcggcgtttcggcataatgcgaactaatttattaatgttcaacaacagaatttcgtctattggcaataaagaatccacaaatcattgcaagaatggccatcgcccaccagaacgttgagatcgcctgatcatgatcgatgataatcaaacgaatgacagctgtgatgccaatataaatgaagtagcgaagcggaaaatgaaagtctgatttgaagtatttgataatcaaagcaatgaactcaaagtacatgaagaatataagcagttctccaagcatctcataatagctgtccactttgttgaacagtgacttgtatacgaatagcacaatgtaccaagtctcgctgatcagaagtgcgcttaaggctaacgccagaaagaacagacagacgttgagaagcgcttgtaacaggtaaggcacctttttgaatttgttagaaaatctcatcatgttgtctcctatttcaatatattcgtggtttttattctcagcctacatcttggtgttccaaaatcgtagcacaatgtagtacttagaattcttttgtatactgtgaaactgtccctgcatgcgggacatcattcgcgcaatgcttctttcaccgagtccgttgctttccggtgttatatctgcaagtttaatcgtattgctaacatggatctcaaatatctcttgatccgatacaaacgtgatactgattttttcttccggatctgcgtatttcaataagtttgacatcacattatcaaatacacgaccaagctcctccaaattcacgttaatataggtttccggcagctcgcctgaaatatggacccgaaaatgctcctgatgaaggatagcaatctgatctgatattagatcgtagatcacttctttcactgcaacggtctccagatcggcctcatattccttgttcagcaggaaatacgcaaacagattgtcagacaagctttttaattgcagtgctttaccataagcattggctacataccgatctttgctggcacccgcttcgcctccctcttttttggcaaactccagattcatgatcagcgacgtcagcggtgtgcgcatatcgtgcgacatttcggtaaccaggctgcggctctcagcttgcaattcctcgatagctttaagtttatccaggaaagctttccgcagatcctcaatgctctttgcaatcatcgctaattcatcatgcccttttatcgtcatctcgtagtccagttcgcccccttcaagaatatgaatctcttgatgaatcgttttaaggtagcgaagactttggcgaattccgaagagaacaatgattaaaaagatgagggttgccccgagcaaatccaatgcaaaggccagatcataatatcgggaagagtagaaaccgtcgataatgactcgtccttcaccatcgctaaacttgacaggatgtgaatgattttgagcgtactgagtcagcttttcctttccataatccgattcggaataaatagaatcatattgcagctcctgatccttgaatatggtgaggttaatgtaattttcttttttgacccactcgccaaacgcttttctatctgatgtagacaactcattttctgaaacgtacttgctgaatttttgaatgtatcttgctgactcctcgtgataatactcttccgaactcagatatccctcgatcagatcatctgtgatcttttgcaacgtcagaaagatcacaccactcacaatcgcagcaaccattatcagcaaagccagttttttggttagcgtaaatttaagatgcgccaaatcgatatcctcttccccattcagtttttatataaaccggacgtgccggatcatcctcaattttggagcgcagcttccgtatatgcaccatcaccgtattgttggaacagtaaaagtaaggctgtccccacacactctcatatatattttgggcagaaaatattttgttgcgtttgttcatcagaagtttcaggatacgatactccagatctgacaacttgatttgcttctcctctttccacacctcattaaattcttcgctcactcttagtttgcccccgataagaaatgtttcttcctgttccttcttttcctgatagatagtatatctgcgtaattgagcaatcactctagcgtgaagttcctcttccgagaatggtttagtcatataatcatcgccgccggcgagtaatccctcagttttatcgagtgtactcgatctggccgtcagaaacagaatcgggacgttagaggatttcctgatgtgctgacatgtttcaattcccgaaatgcctggcatcataatatccaaaataaccaaatcaagcgagtcattcacaagttgcaatgctcgctttccatccttggctcttagcacctcgtaacctgcacgtgtaagggattcctccaaaagatcaccaatatcctcatcatcctctacgactaatattcgataggccatgtctctctcacctcatgattcttgttgttatttctcgtgtgtccttactatatatcgttcatagtaataagtacgttataagatactacgtaaatcttaacaatttatgaaagctgatgctcgccacaaatttgtcacattttctaaaaaaaatgatgactcttcataaattgttaagattcggtctttatatttatccattgtaaggctcaagtttttcagatccgcactacacattgccgtgataaatgggaaaggagtattgatatgattgtacaaaaagaaggacgcgggcaaccggtgagtctgcgggaacgggttcattttctggacatcgtacgaggatttgccttgcttggcattattattgtcaattattttctgatcgtagattcagtaaagggattcgaaatggcctccgatgacgtactgcataagctggtttcctggtttgccgaagggaaattcgttacgttattctccttcctgttcggagtcgggtttatgatctttatggatcgagccgcgcagaaggtagagagtcccaacaagctgtttgcccgcaggttatctatcctgttgggatttggcattttgcacatcacatttgtttgggtcggtgacatattggccttttacgccgtaagtggcttcctgttactcgccttctataaacgcacggccaaaacggtgcttagatggattatcgcacttatcgtgtttcaattcctgactcctgttttcacaatgttgtacaatgtcatcaatactgcagggtcaaaaaacccgaatttttcagagtttactttgtttagccacagcagccttacctacatggaatccatcagcactcggtggacagatatggtcacgatggctgccggctctttctctatgatctattccatgtttctcatgtttctgctgggcgtgtactttgttaagatggaatttttcaaagacatggaagcgaaaaagcctatatggaagcgtatctggatcattagcacaatcgcttttctaataacacaaagcagtatattactagacatgtttaatctttctgagaatatgctgtggaaggacatttcctctgtcttgggtcaaaatggcggcttaaccggaagtatgttttatatgagcacttttgcaatgctgtttctataccttcctcagctgcgaggccctatgatgatattcaccaaagtcggacggatgtcattgacctgttatctgcttcactctatcattggaacagttctgttcctcaggtacggattcgggcttgcggatcatattcaatccgccggcacgttcatgttcagtctggccgtgtacttcgttcttatgagctttagtacattgtggttgaaacggtttaggtacggtccgatggaattagtatggcgcaagctgacgtacggcaaagtaaacgggagtcccaaagcaactccgctgcattcggaaaaatctattcagaaataacccccttgcacagattgcatgacttcaaattagtgttgttgaatgaagcgggcattaaacggacagatttgatatatggactagttatttttatatcatttaggcttctttgggctaataaatccaccagagtttactcaatgtgcattgctcatgatcgaatctaaattgaatcttttacgcatgttcatagtcaaaggcgcctcattcgactatttttgtaacttttcgcaggaaaaattcgagaatgatgacaaatcccgcatacgacacttaatacggtagtgaacaatagtaaattagggttacatgcagcttgttttccaatgaaacaaagaaaaagaatcatacaaaaagacaggagaaagcttttgaagtattttaacgccaaatttaccgcggaagaaagagcgatggaatcacttttttgtgaaaaggcctcgcagagcagctcgaatgttttactgaacgactgaactctatattttagcaactgagggagtgaacaatcatgaaaactaaaaatgaaccaaaagttattctggaactagcaaaggaatctgatctgccagaattccaaaaaaaattacaagaagcctttgcgatcgccgtgattgaaacgttcggtgattgcgaagatgggccgattccatcggacaatgatgttcaggagtctttcaatgctcccggagcagtggtatatcatattcttcaggatggtaagaatgtcggtggtgcagtagtacgtatcaacagccaaacaaatcataattcgctagatttattctatgtatctccagaatatcacagccaagggattggtctttctgcttggaaagccattgaagcacagtatccggatactgtgctttgggaaaccgtgacaccttatttcgaaaagcgaaatatcaacttctatgtgaataagtgtggatttcatatcgtagagttctacaatgaacatcactctaatccgcatatgcatcgcaatggacgtgaagatgacaagcccctactgaatgatgatgactttttcagatttgtaaagattatgaaaaaaaaggactaaacaattgaacacggcgagatgccgcagagagttgctggtaacttttttatatttcattatcagaggaaggtaataatgatgtttaaaaggtgttttgatccctgtctcataaacaggggtcaaaacacctttgaatcatcggtttcttttctgacatataccacgcccactagtccctcaacatagtaaaaacatatcatgagttacaaaagcttttattcaaagcatatgtttattttatttatacttattttcatcatttttcagaattctggacacaaatcgggtacctattagaggccaaggaactctacatttcattaagaaatacgtactcattgccctgctttaattaattttaagccctcgcactatgcccccccctgaattaagtatttgatgtaactttgaaattaagtttatgaaaatctgtcacaaacccttatttcataacacatcatttgtttcagcttccctcgcgaataccggattaatgctcggctttaagatagtcaaccaatctctccgcactgttcttaacatcttcttttgaaagatgaagtgtcccatattgtgtaaacgcaggaagaaaacgcattcctatatagttagcagtgacttgaaacggtctgataagctcgctgatcgtgatattatattctccgcctgcttgataatcagattcctgtgcgcctaaggagatagctaagagtagttcttttccatgcaatttagttcctccagttccataagcccagccatgtgttaacacatcatcttcccattgtttgagtaacgcgggactgctgtaccaatacattgggaactgaaaaacgatacgctcatgatctaacaggagctgctgctctttttctacatcaatgataaaattagggtattcaccgtacaggtcatgaaccgtaatgtctttctcttgctttaaacgattcatccaggttttgttgacaacagacgtttccaaattaggatgtataacgataactaatgttttcattagactgattatcctttctttgccaattagttattattttttacgataatgaattgattctaattttaaaatagcaactttatttacacctattttatcctttttcatgaattcagggcaactaattgggcaccaaaatcaatgatgacttaagacattgttttgtagaaatccgatatacagaataatccattatttagaaaatttctaccttttccctcaatccttaccaatttaaactcattaaggagatactttatcaccaactttaaataataatggaataagtgctaataaaataattcctacaaccaacgtagatattattaactccttccatacaatcaaattctttaaaaacatttgataaataactaatgagtttactggaatgttaagcaataagcccgtaagaagtccaggtgcatactttttcattacaacagttgcgataagatgtggaaaaatagcgttgataaccatagaacctagaaagccaatgaaaatccattttgcaatatctgattctggcatatataaaaaaccaaatgcagataaataagccaacatagttataacaatgacagcaaaatgaaattcatttgaagttactggcttttgaaactttgaagattgttgtgaccactcaggtaaccaaatagcttcctcaatattatgaagtgtaatagcaaaacaaaaaaatgctacgaaataaaccacctatcatttcctcctcggtgccacaaccaatatggtttggcaacattatattacatttgaggctgattggatatggtgttaaaagagagaagaatctgccttagtagttgcttcttaattatatgtgcaataacgtgttgttacgtggcatgtcatattcaaatataataactctaaagcaaacaaagatacctatatagtttggcatcctcttttttagttcgagtccctctatttattttgggcacaaaatagacataatttatattgactcattatacccatcacataccataccccttaaaccaatcaggattaaaatgttttaaaaaaggtgatcaaagattaagttatggtctcttttattttatgtatgctgtcttaatgcaaaacaacactggacaccactaagtcaaatgcatttcatggtactatagtcaagacttgtccaagtcaccattatcaaaatgaatttcatcaaacacttgaaacatttattgaacgcggccaagtgtcataacattaataagaaaccaacgagtgatgaatcttttaatctttcattttacccgctggctcatatcaaaggagctctaaccaaattttaatagctgtcgcacctattaattgcgctaaaacccattgcaggaattttgtatttactttttgcccaactgatgcgccaataggagaagctattaaactagtaatcataagaaccagagctggtacaaaaagaacctggcccgtgattacttttccaactgttgcgccaatggatgaaagaaatgtaatcgcaagagatgaagcgactgtgactctaacaggaatatttaaaatcgataacataatggggactaggataaaggcgccgccagctcctaaaatacctgatacgccaccaatgataaacgctaaggaagaagccaaccatttattaaatatcacttccttatcttcgctatgttcttgtcctttctgtccttttttaggtataaacattaaaataactgctataatagccagaattccgtatataaagttaattcctttttcagatatataatgagaaaagtaactccccaatacactccctaaaaggatgctgcttcccatgtaaataattaatgttttatttataagaccactcttacgataagcccaaacaccgccgagtgtcgcaaaaaaaacttgaatagcccctatccctgaaacttcatgggcagttaatgacatcactcccactaaagaaggaatgtacaatagcattggataattaataactgctccgccaataccaatcattccggaaataaaggcaccaataaaccctataatgaaaagagttgtgataaaggcaatatccattttatttgcctcctttcataggaaaagggtatctttctattcgataccctttcacattcattagcctttttgaatccaaaatttcaatatatcgccctcgtccgtttgctctaaaaggtcatgtccgcctgatttagaccaggctgtaagatcatttttggctcccttatctgttgcatgcacttctaatatttgacctgattccagttcattcatcgctttttttgttctgacaattggcattgggcatgccaagccttttgcgtctaatactttatctgatttcatgttcttctctcctctttttagcagaaacttgtgttaccgtattgcacagcggtttgggccaatctccatttcacgctgtttttcttcatctgggctgattttccccatgtttgtttctcgaatctcttggtatgcatttggttgcggaggcaaatgatctgttactaggtgtctaaattctgtttcatccgcaatgttcaaaccatggttctcgctaaataatgtacttagttgtttaccaacacttccattctcatttagctcgtcaatgatcataaagtgtgccggtaatacaattaaatcctttgataacgctttgtaacggctataaagcgtttttcttaaatctcctacccaatcttctgccataccggctaagtctggtctgccgattgaatcaataaacaagatatcacctgaaagaagatactggtcatcgacaatgaaagaagtggagccaatcgtgtgccccggagaataaatcggttgaattttaatcgttgtatttccaataataatgtcatttccttcttccaacggctgataatcgaattccacttcttcagcatctttaggcggtaaccagtaggttgcttttgttttttcagcaatgactctgccgcctgaaatatggtccgcgtgaagatgtgtatcaaatacgtgagtaatcgttgcacccttccccttcgcaaaatctataaagaaattcaccatacgtgtcgcatcaataattgctgcttcaccattggaaatgaccatgtatgacaagcagcctttaccgattcgaacaaactgatacatctcaccgccatcttttaaatccccgacttttaccggctctaaatgttcgctccatgctttcattccacccttaaggtaggatacagaatgacctgcttcagaaagcatttcggataccatgacggatgaaccttcttttgcgcaaacgaccagcacttctttatcagaaggaattttctccaagatatcttctacgccatctaaaagatcaaaataaggaacattcaaatggtcaaagtcatgcccttctatcttccaatcactaaaatcattttcattacgcacatccaaaataaataaaggttctttgttaaagattttttttgtcacttcttttggggtcattgcctttacggtcatgtttcaatacctcctatatcaaatcttttagcgggactaaaacgttaaggatacatcagcatctttcgtaaaaccaaaaaaggtaacagccccgcctacttcgattccttccataaaatcatcttttgttaaacccataacgtccatcgttatttgacaaccaaatcatgcaactcccatttcaatcagttaagaatagaaggcacatttgcgttcctacaaccttctgcgacatgctcttttccttgtcgcaatattacagactttataagcatcaaacagaccgctatttgccgcaataatcgctactcttgtactcatctgttcatcatgctttttatttattcggttttacctgtccaatcccgcatacccgggacaacattaataacctttttaaaaccttgttttttcatggtgcgggccgccatttcactccttcttcccgaatggcagataatataaatttcatcattttcgtttaattcgttagcgcgcttttccacttcaccaagagggatatgcacaactcctgggatatgagctttttcatattcctctatctctcgaacatctaaaatgttaagagactcgtcactatctactttctgtttgaaagcttctaatgaaatctcaggaattgaagatgcattttctgatgaatgctctcctccttttcgaagaaaatgacgaagtatttctccctctgcttcagtacccagatattcatggcctgtactttttgcccatgcttccagatctgctgtagaacctttatctgtcgcatgaatttccaatacttcaccagcttttaaatccttcattctcttcttcgtttttacgataggcattggacacgccaaacctttagcgtctagtacaatagttgctttcatcattttttcctccttttcttatataggggtgggggtatacaaatatacaaaaagtttctcactgtaagttaacaccatgtattcatacccccttttatatttgtgatgtttttaaatccttgtttcttcaatatttttacttgcctttaaacttctcattccgcttagcaatgagtaaatgagtaacattagataaataagttgacactgccttcctcagcatctgccaaataagctgctacaccagcatagtcaatatcatctaatagttctttttcctgtaaaccaagaagatccattgtcatcgtacaagctacgagctttaccccctgttcttgagccatctcaatcaactgaggtaaagtaagtacattatgctttttcatcacatttttaatcattttagggcccatacctgcaaagttcattttagataaacccatcttatcagcaccacgaggcatcatctttccaaacattttttcaagaaatccttttttcactggaatcagctcttctttacgtaaagcgttaaatccccaaaaagtatggaagatcgtcacttcatgatcgtaggcagctgcaccatttgcaataatataggctgccattgctttatcataatccccgctaaataaaacaattgttgtgcgttttgtttgttctgtcatgtttattctcctaactaattacccctgcgggtatattaaagtcaaaaaattttttcgaaagatctgcttttattcaactctttaaataccatagggggtataatataacgcatataaaaattcgtcaaccttaggttgatgaatttttatcggctctttaccaataagtcgactgcttcttttactaaattttgtgtgtcttcgcctttttctaaactttcacgaacacaatgttcaaggtttgtgctcacaattaaacccatcgctcgatcgatcgcattacgggaagctgctaattgggtcacaacctctctacaatcttttccttgttccatcatagtcaatacacctttaatttgtccttcaatccgtcgtaagcggtttttaatcttttgatcatactccatatatcaatgaaatcctttctttcatttatttttacatttacatgttgccagttcataactgtttacatggatacctttgcgctttagaaaacgcactcctaaatttaattccacccggtcacgagctattatgtgtattttatcacgtggaatctctaaataaaaacgttttagatacgcatatgggatgtttaaaataatattatccgaaaaattggctacatcgttataatgacgaatatctaatattgtgatgtccatagcctctaatttatctttatggatacaagagattccggttataggataataacgtctatacgttgcaatgataatcacaaaaataagcaggaatgcaataactaaataattgatactatttacaccaccttattaactctttgtttattcacaaaacaataatatacccccataggtatatagtcaagtgtgaaagttactttctttgagctgatagattcatttcgatatccgcggattgaaaaaatacttacattcgataatgccaattctgctaaaaggaactcgaataaagcaataagccgatttaattttaaatcggctttatttatcaattacttaaaattagcacaagacacgctgcttggatattaaatggggtttcattagcatggtactggttccccatgtttcatgctggatgtgactttaattattctagaattctccagaatatctgtgctaatcttccgcagccactgcatctgctttggtttcatgaactgtaccaaatggatggttaggaggagcataaatggagtaaagttttaatggcgtatttcctgtattaattacgttgtgccaagtgccggcagggacaacaatggcagaatcatcatagacatttctttgaaagttcaaatgatctttgctctttcccattttgacgatcccacgcccctgctcaatccgtaagaactggtcaacgttaggatggatttccaaaccaatgtcttctccaataccaagactcatcaaagtaacttgaaaatgctttcctgtccataaagcagtacggaacgtattgttttgttttgtggctctattgatatttacaacaaatggttttggtccataatccttcaaaagaaggtttctatcttcatatgaagagcgcaaatcggcacctctgtgtactttctccatctcatttggaatagtccaataaacagatcttccatcattatacatcggcacagtcacataataataacattgaggcgaaaaagggttatagtacattttttgatccccgcaattataaatttttgtgatagtatcctatgcatttattaagggagtgtgctaaatcaagaaaactcatattaaacacaaaaatgaatgttcgatcaccgtttgattcatggatgaataatttatcaccgaccttgtaatcgttttctagatgttgaatttcactagcctttgttaacaagacatcgaatgacacctttatatgatggattatcaaaggtcgacgatcctaaatggcttttgaacatttacatagcacaacaacagagtatacggaattctgttgtttgtcccccctatcccagctcttttagatttatctctttggatgcgccttgatggccagtttttcagcagcatagaatttatcccctcctgaatcgttatagcatatttcaacgccgatagacttgcggttcccagtgccgtttgtaccgtctcctgtatgtgggctcgcttttagtaaaccagtttatattctttttgggcacacaacagaaacaattttccatatgaaaatctcgtaattttacacctctttaacttgaaggaggatttttgcatatgtattttcatacccgtcaactaccatctcatccagcatatattcctcatatgcattttcccctatttgcattccatttctttcaatgaactcaatgattctccggtacgcctcttcagtatttccgcctatttcatatccaactgcatacaggccttttggccgtacatgataatttatgttctctgccccatcttttacttttatataaaagtaactgtaattgtagaagtctttttctaagatttgttcccgtgcaaagattccgcctatcggatatccttcatctaattcatattgctgaacttcatgaatgagttctgaaatggctgccacatattttcgttctggtaagtttaatgtttttcggcttaacatgaatgtttcttcatttaaatattcaaaagaaattgaggaaaaatcagtctcaagtgcttgttctgtaagcgtcacttttgtttgtaagatcgtttgcaactgcttaagctcatttatttttttatcaatctcaatagacttttcttttagaacatgcaggatcttgtctggtgtttttccttttattagacactttatttcttttaatggaaccccaagctctttaaatagactgatgacttgaaaagtctcaaattgatgataggaataatatctatacccattttctttttttatttccggcgagaaaagaccaatctcatcataatgaaataaagtttgtttttttacacggcagagcttcgaaaactcccctgttgtgaaatacttcttaacatcttcgctcataaaaacctccttgactatacggtaaccatataccttatgatttgattgtacttgaaaaaagcttcaagcgaaaaggataggtaaaaagggttcaattgagtaaaaggggaattcagatgaaaaaatcaataaatgagcaaaaaacgatattcattatactattaagcaacatcttcgtagcatttcttggtatcggtttaatcattccagttatgccttcttttatgaaaatcatgcatttatccggcagcacaatgggttatcttgttgcggcttttgccatttctcagttaattacttcaccttttgcaggtaggtgggttgaccgtttcgggagaaaaaaaatgattattctcgggttgcttatattcagtttatctgagttgattttcggattagggacccatgtttcaatattttatttctcgaggatattgggtggtgtaagtgcggcttttatcatgcccgcggtaacagcatatgtagctgatattacaaccctaaaggaaaggtcaaaggctatggggtatgtttctgctgcaattagcaccggctttattattggacctggtgcgggaggatttattgccggctttggtatccgcatgccgtttttcttcgcctccgccatcgcgttaatagcagctgtcacttccgtttttatactaaaagagtcattgtcgatagaagaacgccatcaactctcatctcatacaaaggaatcaaatttcattaaagacttgaagagatccattcatcctgtctatttcattgcatttattatcgtctttgtaatggcttttggtttatcagcttatgaaacggtattcagcttgttttctgatcataaatttggcttcacaccaaaagatattgcagccattattacgattagttccattgttgcggtagttattcaagttttactattcgggaaattggtcaacaaacttggagagaaaagaatgattcagctgtgcttaataaccggtgcgatcttggctttcgtgtctactgttatgtcaggatttttaactgttttgcttgtaacttgttttatttttctggcgttcgatttgctacgtccggccttaaccgctcatttatccaatatggccggtaaccagcagggtttcgtagcaggcatgaactccacatacaccagcctgggaaatatatttggacctgctctaggcggtatactatttgatcttaacattcattatcctttcctttttgcaggtttcgttatgattgtcggccttggtcttacaatggtttggaaagaaaaaaagaatgatgctgcagctttgaattaattcattttctataaagttaagtcatttggatgcagggaatgcccctggttaggcacaataagaaaaggtacttaatttgataggctacatgttgcttgacgtgaatatagtataagctgagttttagcaatatcaggataccgggataagaaaaaaggagaatgtagtatgagtataaacataaaagcagtaactgatgataatcgtgctgcaattcttgatctacatgtcagccagaatcaattatcatatattgaatctacaaaagtatgtttagaagatgcaaaagaatgtcactattataaacctgtcgggctttactatgaaggagatctagtcggttttgcaatgtatggattgtttcccgagtatgatgaagataataaaaacggacgagtctggcttgaccgattttttattgacgaacgctatcagggaaaaggattagggaagaaaatgcttaaagccctcattcagcaccttgctgagttatataaatgcaagagaatttatttaagtatatttgaaaataatattcatgctatacgcctttatcaaaggtttggttttcaatttaatggtgaactcgactttaatggtgagaaggtaatggtaaaagagctatagatatccaagcctccttgtttgctgagaaacgtttgaacttcgataatgattacctacttaaactgcaagatcattgtttaaaaaagcctggatgaaaatttcatctcaggctttaagcatcttattagtcaaaatctcatgtgttttatccagatgttattcttttttccggacaatttctaaataattaatatgccggccaactgtttcgtgcactttaaaaatatacccatcggcttctataacggacccaactgcagcgtctatttgttgagtcataaaccagccgcctattgtatccacttcgtcacttgctaacgtcgttcccaataaatcatttacatcttcaatgagcactttcgaatctaagatatagtgattatcatttacttttctaatattaggcacttcatctttatcaaattcatctctgatttccccgacaatttcttcaagaatatcttcagcagtgactaaacctgaagtgccgccatattcatccacaagaatagcgatatgtgttcgctctttttgcatttttaccaatacatcatgaattggaacggattcaataacatggataacagggttgatatgattttctaacttgaaatcctcttttatcttctggtctgtgtcaatataagctgacaaaaattctttagcattgataaaaccaatgattgaatctttatctccatttaggactgggtaccttgtatagctctctgtcttaatgatcttaacaatagtttcataagaatcctcactagaaatcgctacgatctctcttctcggaatcataatttctttggcgattctttcatcaaattcaaaaatattatttacatatttcaactcattttgattgatttcaccgctcttatagctttcagacagtaagatgcgcagttcttcttcagaatgagcaagttcatgttctgatgcaggtttcaaaccgaagagtcctactataaaccgggctgaaccatttaaaaaccatataaaagggaacaggatgcggtaaaaccaaataattggctttgcagtcaaaagagtgatggtttccgctttttggatagcgagtgttttaggagcaagctctccaactacaacgtgcaaaaaagtcgccatcacaaaagcaatcactaagatcaatacatgtgagactgtttcacttacatgaaaatgagcaaataaggggtgcaaaatcacttcaaaagtcgattctccgacccagccaattcccaacgctgtaaccgtgatccctaattgacaagctgacaaatattcgtccaaatgagtaatgacctttttggctgatatggcacctttttttccctctaatatgagttggtcaatttttgatgacctgatctttactatcgcaaattcagtcgcaacaaaaaatgctgttaagacaattaaaagagtaaagattataaggttaatggttgtcaatgatttgccttacctagtaaggcgtacacctccgatgtaaatatttattgaataaacaaaaaacagtatatataacattataagttcaaaagaacctaaaatcaactctgaatgatgtaaataatcatctttttccgtatggagagtggttcccatagtcttcaactaacgattagtggcgttttaaggcttaaaaaagaaagcaaaataaaaacacacctgaattttctggtgtgtttcaataatacccaaccgtcttgatttatttaatgtctttataaagattttcttttaaaatttgaatcaattcggcctgttgctttatatttttgcggccatttctattaattgcagcaagttcacagacaattccagctgaaatgaaaaacaataaaccttcaaacattttaaatcccccactgtctaagtgatagtcaaatttgttttttctttttgcaatacctgcttataatcttccttacgctgatatatgttatttaaaatgagtccaataatgacaaacagtgttcctactatatcaaaagcagttatgttatatcctttgatcaccatgattaacaatgtagtaatggggacaaagttaataaataaaatcccattaatggatgataggattttaatgccatagttccaactaaggagggctatgatacctggtaaagtaatcataaataaaaaatcatacttaattgctgcaatcactttaatactcggtaccgacacgtaaccttgcgcggtaagtatagctgtcatgattcctgttatagctgtgccgaataaacatgtcaaagttgaataacgaagtgtggaccactctcggaatatctgtccccccattgtgtagacaacccaccctaaaacaccaatgaatataaagagtatcgagaatagatgatcccctaatgaaaaaaagaaacttatattacctttggttatgaccatcgaagcccccaaaaaggcaatcaatatactgatcattgtgtattttttaggtttcacatgtttatatccccatagaataacaattgaaagcatcggcatgagtgcctcggcaatggatgctgtcataattccagacttccccatcaacctttgacctaaaaaaataagaacattgtatatagtaaacgccatcaccccaaataaaatgatccattttgctttaccctctaaatgaaatgatttctttccttctctcaccaataataaaatcactaacataatcgttaccacaccgtagcgaataaatgaaaaataaaacggatcaacaaattctaatgcatgatctgcaactggaaacatcgcgccccaagacatacttgctactaaacatgtaagggcaccaatgaataattgaccttttttcattgaattcccctccttttctttaaaattacaatgagaattataaaaagaagtaagcatcaagtaaaatgaacaaaagtgatgaaaaacatcattgataatgatactttaatgaaggggggatcttcatggaactgcgagacttacaaattttcaaatgcgtagcccatcacaagagtattaccggtgctgcaaaagagttaaattatgtacaatctaatgtaactgcgcggattaagcaattagagaatgagctcaaaacacctcttttcaatcgccataaaaaaggggtttcactaagcccagagggccgaaaaatgattgaatacgttaacaaaattttgaaagatgttgaagaactggagcaagtctttctagatactgaaataccgtctggaatattaaaaatcggtacagtggaaacagtgaggatactgccgaccatcatagcttcctattataaaaagtatcctaatgtggatttatcattgcaggctggtctaacagaggaacttattaaaaaggtcatgaatcacgaattagacggagcttttatttcaggccccttgaaacattctattctggaacagtatgatgtttatactgaaaaacttactcttgtaaccagtaacaaaacgtttaatatagaggatttttcaacgactccgattcttgtttttaaccaggggtgcgggtatcggtctaggcttgaacaatggctcaaagatgaaggtgtgctcccaaacagaatgatggaatttaacatcctagagacaatcttaaatagtgttgcacttggactcggtataacagtggtaccggaatctgctgttatgcatctagctgtacaaggtaaggtttattgccacccattgcctgagaaagacagctgtatctcaacaatttttatacgccataaagatgcgtacctgacaaattcaatgcgcagcctcctaaagaccattgttgaacataaaaatatgagtatggcttaaagtgatttttctctttctatattctaacttcttaaataaaagagaaggctcatctccacttcgctacccttattcacgcaaaaaatagagcagtaaacatgtgagttactgctctgcttcgtttattcaccgttcatttgttttacaatgtattcagcatcatttcctacgccttgaagcaacgctgaacctcgcttatgctgccaaggcaaacctataaagtacaatccttctacaggtgaaacacctctatgatgtatgattcgaccttcttgatccaaaacaccttttatatttatccaacataagggattcctgaaaccagtagcccaaataatattgtttacttctaatgtagatgaatctttaaaaatgatttcattttgctttgcggcaatgactcttttttttaagatgatctccttctgttttattgcatgttttaattcatgcccaaatactggatcacctttcttttgaatgaatttgcctactattgatgtatgacttgcatgtaaaactcctagtttatcaaaccaccaaaagatgcttctttttccgatcattaaagggaaataaacaagtttattactacaagctaaatatgtaactctttctttggataattcaacagctatttgagcaccactattcccaccaccaactactagtacatttccatatgccaattgttttgaattcttatattgtgatgagtgtagttgattaatattatcggataaatcctttgatattgatggaatattaggggtatgaaaaggccctgtagcaatgacaagattcttcgtttgatattcttcccgatttgtttttattaagaaataattctttatttttaggacacttattacttctgtccgtaattggattggaatttcaaattttttaacatacttctttagataagcaacaatttcattttttgaaggaaatccatgtttttctccttcaagatgcattccaggcaaagagctatacattcgagaagtaaataaaactaatgagtcataccgatctttccagctctcccccacctcatgacttttatccaaaatgataaacttttgatcggactgcttaagataatatcctattgagatccctgcttgaccagccccgattactatagtgtcgtacacattatcaccccgccaatttcaaattgtcagtagacagaatctgcaaaatcctagttgatctcctcactataaagttagataaaaaatttaatggtgatggtggtcacgctgcttctccattttgggctgacaaaggatcgcattgtcgtggttatgcgcttcggtttccatttgaatggttacgtgcgtaatgcctttatgctcaagttcatgttcaattttgcgtaaaatattttcactttctgaaatggtcagttgatcgtcaacaactgcgtggcaagaaagagcattcaatccgcttgtgatagaccatatgtgtaaatcatgaatgttttgaattccctctgtcccttcaattgtacgaatgatatcagagacatcgatattttctggagttccttccattaagatgtgaatggaatctttagtcacattgtaaccgcttcttagaacaagaatagccacaatgatactagccaatggatctgcccagccccatccaaagaagatgataagtatggcagctaaaatggcacctacagagccgagcatatcgcttattacatgtaaataagctcctcttatattcagattattctttgtatctccgccactcatcataatccaagcgaccaatagattcacaactaacccgatgatactaattgtaagcatgccggttgttgctacttttggtggattagagaagcgttcgattgcttcataaatgatataaagagaaataagaattaaggcagcaccgtttatcacagctgcaagaatctcaaatcgtttatagccgaatgtcttattgtgatttgcctttttttcagctaatgtaaaagcaatcagggcaaccattaatgaaattgaatcactcagcatatggcctgcatcagataaaagcgccaggctatttgttaaaaatccacctatagcttctataatcatataacctgtaatcatgataaaagagatcaataaaacctttttatttgctccttcattatgattgtgacccataaaaaactcctccttacctaaagtttttaatacatatgtatttattatttcaaatctgttatgaagcattctaacatgatacaaataatatttatatatgagcatgtgttcatatataaatatatctgctctttactgaaatgtcaaaatatttttatagaaatccacaatacctccttaattattcttttataaacataaaaaagcggagcaaacacatggtttgctccgctaccctagtttctctatccttttcttcaatcaagcatttgagggtagtattcaactacaatttacctgttaaaaattgggcctcaccaagtccaaaactccagtcagcattatcattttcaacaatagatacaattaaatcagttgatgcgataccacactcagattccagtctttcagctaacagcctgtaaaatttttgtttcttctcttccggtcgggatttacttgtaactgaaagaacaacaagatttttagttcggttaaatcctaacccagtatcctcaataatcatatgattttctggatgttcatgaacaatttgataacggtcttgttgaggcacatcaaaagcctctactacaacattgtgagcgacatctaaaagttttttcaaacttgattgatctcgcccttctattaagtcaaaacgaagtaatggcataaaatcccctccttctactacaacagtctttttaatttcattcgttaatgtgtcagctatttccaagcagctgctacatttagaaaataaagtaatttcccaataaccccttcattctggtgttagtcaagcctatgttatgatgtgtatttccataggcaatatacagaatcaacttcgagtaattaaccattttttgaaatagctttatcacttactttagaaatcatttattcttctaagctttagtttacatgaagctctgctatcatatataattcaaaattaagatggaagacatctcaaaatcagatatcaactatggaggactagatgaatattcagttgttacaggtttttctcactactgctcgtgaaggcagtatttccaaggctgctctgactttaaattatgcacaatcgaatgtaacgaataagatacaacaactagaaaacgatttacagacaaaattattctatcgtcatagtcgaggaatcacacttactcccccagggcaaattcttgtttcttactcagagaaaattctacatactattgaagaagctagagcagccatgggcgaatcatccgcgccttctgggccactgcgtataggatcaatggaaacaacagctgcagtttggcttcctcaactccttgcacattataataacctctatccaaatgttgatttgaacctagtaaccggccctacggaacaacaaatacaagcagttttacattatgagttaaacggcgcttttatttcagggcctattgaacaccctgatttagttcaagaaaaggtattggatgaagagatggttcttgttacaagtgcttcacaccctgtgatttcttccattcaggatgttcaaacacaaacaatgcttgtattccgtaaaggatgctcatacagagcaaagctcaatcatatcctgcaagaagaaggtttattacctataaaattaatggaatttggcatacttgaagcgatcattggctgtgtaagcgccggcttggggatttcactgctgcctcgttcaatcattgcttcgcatgaaaaagaaggccgcatccgcagccacactatctctgacaaatattcttttgtatcaactatgtttataaggcggaaagacactttaattacccctgctttatctgcttttttaacgcatatgagggatcattttcagataaagaggccagatcaatcgtaaataaatggatggaaggcatgcttcgcctcaaaatacccctgatcagttgtctgatataaaaatataggcgcatctcaatgtttgtatagagcaaaaaagcaaacttcggtatgtagtttgctttttcttcgtgattttgcactctgaatcgtgaaacctagtcgatattaggatgtagattttcctcattcaaagaattttgaacgaaggtcattgccctagacacttggttgcgtcttgaagttaaaggctgactatttcctaaagcgtcaatcgctctcacaactattaaatattcacctacagatttcgggtgacaacgggaagattgatattttcggttggacaggggcagaacatccaattgtaacagttgaagtatccactgatggaggagatcctgcagatctgagtgatattgctgttgattgatcaacttgtttttgttcggaatatactcagtatatagccgcatattcctcctgcaatagctggaatgagccaccccagccctatgttatacataggaagaatctgagtgaaaatacgattcacaacttcaatttttattccagccgccttcaaaccgtcaaataggctgatgatgaatgcgaataataaactgccttgatacacttctgtcttccctttaaatacagaatgcaaaaacgttaaaaatattaaggaaatcgcgataggatacatcgtcagtaagacaggcattgacaccttaatgagctgggttaatcctatatttgcgacaagcgtactaaacactgataaaacgacagcaatttttttataagaaatgttcggaaataattcatgaaaaaatgaagaacacgctgtgatcagcccgacacttgtcgtcagacacgccactgtaatcattaagcccaataagattgaaccataagatccaaaataataggatgaaaccttagccaaaacctctgctccattttctaaaatccccagttcttcaacgctggaagcccccatataggaaagggctgtatacataactgctaagagtacagctgcaatcgcggctgcttttgcacaaacaactatcagctgttttttggtagaagctccttgttctttcaatgcattcacgatgataattccaaaaacaaatgctacaagggcatccagagtgaggtatccttcctgaaatcctttaaaaaacgcttgtgatgtgtacccttttgatggtgcttgaatggttccaattgggcgaataagagctacggctacaagcaatccgataaatgtcagcttaattggcgtcaaaaatttaccaactatatcaatgatttttgaaggattgagtgataacaagcatgccaatgcgaaaaataatattgtaaatatgatcaatgagacagggcttgcatcatttgataaaaaaggttttaccccaatttcaaacgatacgtttcctgatctcgggatagcgaaaaaaggcccgattgccaaatagagaatcgtcgtaaatacaatgccaaacaccgggtgaacacggctggctaacgactgtaagttttgtttacccgaaaaaacaaatgctgttatagccagtaatggcaatccaactccggtcactaagaaacctgcattagcgacccatacatttttcccggccaattgaccaagcataggcggaaaaatgagatttcctgctccaaaaaacaatgcaaatagcattaatcctataatgatgatataggaagcagacactttttttgacattatatatcctccgattaaagtagacacttcttgaatagccaggaaacattacagatgctatttgcactggcacagtgttgattccaaaataagcttgtgtcagttttatatatttttatcaagttaaataaaagcatgatcattttgatcgtttccgatatcggttaaaaaaccaattgcaccaaaaccatataaacaacggttccccccgctatggaaagaagcatatttttcttccacaagtgaagcagtacaacagcagctgctccaaccaattcaggaatgccatgacttccagaaagtagactcacatctttcaaacaataaatgactaaaagcccgattaccgctgatggcagcactttaccaagatactgtacatatttcggtgtcggtttgccagacgggaaaatcatgaatggaaggaaccgtgtcagcattgttccaagcacgaccattgcgatggtgatcatttgctgcgtcatagtcatcgtcatacggaaacctcagctttctccaatggttttctcagaacagtcagtacccctaaaatggcgagcatagcaggaataataaattggtttccgccaaaaaggataagactggctactgaaagtccaagtcccgtgagagcactgtaatgctttttctctttcatccattgttctatgaatatcacaataaacagagcagtcatcacaaaatcaagcccttcggtattaaacttcacgtacgacccaaaaatacctcctatcgctgcccccgcgacccaatataaatgattaagcagtgtcacaaaaaacataaaccagcccttatcaacattcgccggaacattagcggtataattgatagaaaatgattcatcgcacattccgaaaatcagataaagctttttctttccagtccccctgtacttatccaacatggaaattccataaaacaaatgccgggcattgaccattaacgtcaaaaaaagagcattcatagggttgaacgcaccaagtaaaaaattcgctgcaacaaactccattgagcccgcaaatatcataaaactcatgatgattggatagattgcgctaaatcccaaagaatgcataaagatcccataagctatccccaaaaataaaaaccccgcaaaaatcggaatggtatatgggaatgcagaacgaaatgcagcccatatttgacttctcttattcatatgagtgtttatagcaggagagcttaaatgtaacgattctttatttttattcaaatcaacaacctcctacatttcatcaattggcacactgacagttcttttttctgtactcatgactatgcttgtgtcaactccactaatagcagggttctgcattaatgaatcaatgataaaattccgataactctccatgtccttcgccacaatcttaagcatatagtcatggcttcctgtaagtgtgtagcattcttgaacctgtgggaatttgtttatatcctctaaaaatgaatgaattgtctccctatttaagggtgataagttgatgagagctagtgctgtgacttcgattccaagttttttctcatcaacaatagtcgtaaactttttaattatacctgcttctactaggttctttgttcttgcaaggcaagctgatggtgaaagcccaattttcttagataaatttaaatttgatattgaagcatcttcctgcaaatctcttaagatggccttatcagtttcgtcaagcataatacccatttcacaacccccaatacaacttaacagaattatatttcatacaatttaaataataacgaatttttattcgttaatcaaatattatttaaatttaaatccttttaaagtattattcacagaataaaattatcctcgcgattaactcataatgaaattaacttacatcagaaagaagtcatgggagagttatgtacttgtgtgacttgataccaacatcataagaaacttatcagaagccaaaaagttattgcggtctcaccgaaaattgaatttgcggtgccctattgcctttttccgcgaacgaaaattgttaaaattcgcaaaacagaaagtctactctattattattttaaattcgtcctttagttcttcttgagcctcttgtataacttctaatacatcgtcagcgtatgaacctaaaaatgtattgctgaactcaaaatttttcaagactaaagtgagcggcaaatccacccaccctgtcaggcaatcccataaagcgtctaaatttctcccatagtagtctgggaagtctagtttatcttttaaatcatcatgtaaaacttctatattttcaaagtctcttccatctattattatttttctcattagaaactatgccctccattattttatcttaacaaacgtttactatgtaacagctgtttgtccaaatgaggctgaaaacaaataaaaaacaccgataggatgaaactattggtgtttgcaagacatcttcatacccggtaggcataaataatgctaaactttgtttttaaaaagctatcatatcaaatttttatgttacagcttttactatcgtttaatctaattgaggagtaaaacaagatatgtttgaaaatcacatatcccctaaaaattaaaaactaatcggcagttcttcgagtgctctcatcagaaaattccctttccatttcatttgtttcttttcgccttttaactgtatatttggacagcggcgtaataaggtggaaatcgcaatctttgcttctaagcgggctagctgtgcaccaagacaaaaatgattgccatggccaaaagcaatatggcggttgttctttctttcaatatcaaatatgtcggcatttggaaatatcttttcatcacggtttgctgatgctaaagaaatgatgatcacatctttccgtttaatctcctgcccatgcagtataaacggttcagccgtccagcgaattgtcgttagctcaacagggctgtgaaaccgcaatgcttcttctatggctgaattcatcaagtccggctgctggcggagcttttctagttgatcatggtgacacatcagagcatatgtcatattggtgattaagtttacggttgtttcatgacctgcaacgataagcagcataatcatcgagtacaattcttctgtacttaattgtgtgccttcactttccgcttgaattaatgcactgattaaatctcctgcaggttctctcctttttttgcgaactaaggattccagatattcaacaaactcccctaacaagtggtcattctcctgaagtctttcaggggcatctgaaaaatcaataattgcttgcgaccatactctgaatttttgacgatcttccaagggaatgccgagcatttcacttatcacgataatcggcaatggaaacgcataatcgtctactaggttcatgaatttgttgggctgcactttatccaataaagaatctgcgatatgctggattttgtcttccaactgcaaaatcatccgatgcgtaaatgctttttgaacaagagttcgcaagcggttgtgatcagggggatctgaattaagcatatgttttgttaaagtctcttcattcttcaatagagcaggacgtttttcttttgcggtaaatacattttcatagtttttctttaatttttcattctttaataaatgtattgcatcatcatatctcgatatgagccagcctttccccagagctcctaaagataatgggtagagagcctgtgattttcgcaattctttataaaattcatacgcttcatctttaaatgctctcgaagacaattgactttccgtcaaaatggttacactctttttttcttttgaagacattcattcgacctccatctttgaaaggttatgataatctttaaatataaaatcaggacgatttgtaaaatgatccattgagatcagtattcatgataagggccaaaatgccgtccccgcattttgaaataaaagatatgagacagtcattaatcattttgctgcctaaactctttccctgataaaatggcgaaactcctaatacttctatgccggctcttttaaggatttggaaaattttttagccccattttgattaatgttatcccccctgctgctatataatcgatcaagtttaatgtcgggtttatcacgatgttttaatagagcggcaacaaccatttcaccattctgaatgccaacaaaaaagaaatgctttttaaaatatgctcttgtcagtactttatgcatttcaaaaataaatgaatgatctttttttcgcgttttacgagtaaatccataaaaggatattgattgaaagattgatggaatagctttgccactttgcttacttcatctgctcttgcttgtcgataaagaaacattgatgcacctcctctgagcagtaaagcaggaaatcgaattaaagcgcccttcctattggaaaggcgcctgccgttttactgtgccaaaatgtttttcatcagtgagtttttataaaatcatttattaattgatcagttgtcaatattgtggcaaattcatcatgcaatgtagctagagatatattatgaatagtcgccgcatcataatatgtatcattttggtctctcattccgaaggctgctgttgcatctgaaatcaggtatgtatcaaaccctaaattaccactcattcttgtggtggttgatacacagtgaggcgtggttaaaccagttatgactacagtggttatttcatttaattttaagaattcttctaaattcgtaccaataaagctgctatttactgtcttggttataatgacttcttcatccataggcttaactatttcctttattgcaaacccttcattctttggatggaataaagaatgaggtttatcagaagtgtgttgtatgtatatgactgtccatcctttttctctccataattctagtattttactaatgttttcttccgcctttacgttattccgttccccccattttttatcatcgaaggctttttgtacatccacaatgattaaagctttcttttcttccacaagataccctcctacgtagaatttctatttattactacattctaaatacaaattttacttttgtacaattgtttaatgatgaatttcaaatgagcgccttctttattggaaaatgcgttctatactgcaactgtgcccaagccgttaaccttcaaatctaatctgagaatcactggctctacagagaataataaaaaacactctaataacgagtgctgaaatgaaaaactattgatttagaagccatttgatacgctcagctgaaatgatgtagtggagtattataagacataaaaagacaatactaactggttttaaataactaaaataaagcgctgcaacagccattgcaaagatcaataattcaataactaaccttgttactccgtttacagctattacagtttgtccgcttcgactaggatcatgaggtactgcaaatacagaccagacaatcataactgcaataggtaaaaccaaagttaaaacatatttaaaataaccattaaagcttatccaagcatacacccctaaggagattagtgcagcaatttcaagggtgaatcttaaaagtaaattagtctgattcagtttttccaactcctctataaaaaacacccccgcaggagatgctctttctctgctttatttcagcgtataaaaacttttctgttcttcctctttagattctattgtagttttcggcgagattacctctacttttgaagagatgataccgactgctgctgttaccaatgctccgataatagaacgatgataagtataatgaaatatgacaacttttcccctcctattcagttaattatccaaataatcaggaagttgtctacaatttgcagaatttgtcgaacgaagtaaagattatacctgggaggctttactcattgtatgaattacagtaaataaattgccttcccttttgagaagacgttccaactcagctagactcttccaataggcttccttttggcgcagctgcttttattcaaaaattgagcaacacctgaatgtttcattggaatttctgaaccatcgatcgctgctgaatttgttgcaaatgcatacgtaggagtagtcgaatggtggttgaaaaatgaaatgccttccccacctcgagtgatggcagaaaaagcgggggttttgttagagaggaatctatagatatgtgtatcgaagatttgacagcattaaaaattatacttacatcgttgggaacaggccaacaataaagcggaagaacgttgtcatttgaagtggtttggaataaaaatgattcgaatatgttcttatcattgtaaacgaacaaaaaaagaacatgttttgaaaaaagattgatcaaaacatcttcttatatgttgtcatagcgtaactttttataaaaaggttaattacattttcggggcttccaaaccaaattttgcccattcttcttttgctggaccataaatacctggaacagttaaacctgcttgtctcataagaacagtcatttgtccccgatggtggttttgatgttgaattaaaaacatcaaaagtgaaccgttaggcatttgttgtccaataaagttgatacgttcttgaagtgtatggtcagtccattgggtttttaatgcctgtacaaatgcattactggcttgatgatagctgtcagctataaactgagcagaagttggaacaggataatcttcagctggggcttggaacgttaagtctgtgtttgaggtaatgatgccaatggcagcaacagtatgccaagcaatacggcctagagtccaattttgtgaagttatttcttgtttaagtgattcatcagtcagactatttaatagtttctgtgtagcatctgcttcgaactcccaagatttcaaaaaatggtctaaggtttgaaacacaaaaatcctccttttcattcttttgttttttcaatgtgcttataggttaattataatgcctcctttcgttaaaaagaacaaaaatttcggacaagaataatcatagtaaaatgcgtagacattcttaaacgtaacgatttacgcatctttttacaaacatctgactacttggtctccattgtcagcgagaatcaaatatcatatgaagacaatcctatattcttatcactttactgagcaataaataccttccgtatacttagtaataccttcatcgtaatcaggatacttatatgcaagaccttctgatacagcttttgaatactttctaaataatgcatagcaagtaaataaagacttccacatttcctgatacccattcacagaatatgtagacatgagttcctcccattctttatttgaaaggtaccgcttcataaatttatagttcttccccatactaaatgaataccctttctgagatgcgatatgccaggccatcattctcaataaattaggacgtacaatttcatttaaatggtcaatggcaaaaaggatttcatttcttgctagtccttttactacgtaagtcgaaaccatccagaactcattacagcaatcatcaaattcccttgcagtcggcctttttatccagtattggcgatcatttggggtcactttatagttgatgaacgaatccttatcaagcaataccttaaccaaaccatcgttattagcaaaataatcttctgcttcacgaattggaataagggttagatctaatttgttgccatcctcaaaaagaataatgtatgaaaaccaattacctaattcgggaggaaaaagctccatatcttctggtttttgcatcataatgcgcttcccaaagatttcgagccactgatcattttctttaaaagattctacatcagttacaaaatacgagatgtcataatcttggaagttgtcaggagggatatttctgtttgtacgtgacccttccaaagtgaccaatcggattctctcatcgttcaaagcaaagtccaaaaaaatgtccatcatttcctgctcacttcgcattacatgttcctccgtttcagccttaatatctaactgtaaaacgtcttatagatttttttactcttgaatgtgatgtattcttctaagctttattttacatgatgttctcctatatatcattcaatattaagatgcaagacatctcaaaatcagatatcaactatgacggactacatgaatattcagttttttgtagagccgccatgggacgacactatctttgacacactttaatcccccctgctttatcgacatgttaactggtatgagagattgacaaaaagaaggaaaacgatatatttaagcgaatacgagtttttgagtaaattttaaaatgacacttttttcaaaaatcatgtcttaacgggaggattcggtatgaatgaatttatgaaaaagttttctttaacaaaaccgattattcaagctccaatggctggcggtattacaaagccccgacttgcatctgcagtttcgaatcaaggtgctcttggcagcttagcatcggggtatcttacgccagacctcctagaacaacaaataaaagaaatatttgagctgacagacgctccttttcaaattaatgtgtttgttccgctaggtctagagatgccaccaaaagatcagattaaaaagtggaaagaaaacataccgttagctaatcaagtaaatcaattcacatctgtacaagaagagtgggatgacttctatcaaaaaattgatctaattttaaaatacaaggttaaggcttgctcattcacttttgatctgccgcctgaagacgcagtaaaggagctaaaaaccgctggatgctgtttaataggaaccgcttcaacagtagaagaagcattgttaatggaagaacggggaatggatatagtagtccttcaaggaagtgaagccggtggacatcgcggagcattcttaccttccaaaggtgaatctgccgtaggtttaatggctctgattccacaagcagcagatgcactgagcgtacctgtcatagctgctgggggaatgatagaccacagaggagtaaaagcagctttaaccctcggagcccaaggcgttcaaatcggttctgcctttttaatttgtcacgagagtaacgcacatccagtgcataaacagaaaatactagaagcaaacgaagcagatacaaagcttacgacattattttcaggtaaagaggccagaggaatcgtaaataaatggatggaagaaaatgaacagtttgagacacaaacccttccgtacccttatcaaaatacactaacgaaggcaatgagacagaaggcttcacttcaaaataaccatgatcagatgtctttatgggcaggtcaagggatacggtcattgactgaggaaatttcggttaagcagcttttaaatcagctttgccaagaggatataaaaatataggcgcacctcattgatagagcaaaaagcaaactttgacaggcagtttgctttttttttcgtaatttcatccactgactctggaaatctaaatactcctacattttcaaagctaatttgaatcgggttatcaatcatcacattgatacgatgcgatcttgataatttcaccacaaccacaatacattaccaacatttcgatcttatctccccttctcaagttttgctccctattcgaataatcgatagctcccatattaaatttgaatagtaaaatggttctttttcgtttgattcagatgatataaagtcatatgataaaaaaagaatgagacagaaagcgtgagaagtgatgaaaataggattttttgattcaggaattggtggcatgactgtattgtatgaggccataaaagttcttccttatgaagattacattttttatgcagatacgttaaacgttccatacggtgaaaaatcaaagggtaaagttaaagaatatattttcaatgcagctgaatttctggccagtcaaaatatcaaagctcttgttattgcgtgtaatacagctactagcattgcgatagaggatcttcggagaaacttcgactttccgataatcggaatcgaacccgctgtaaagcctgctataaataaatgtacagaggaaagaaaaagagttctggtagttgctactaatttgacgcttaaagaagagaaatttcataatctagttaaagaaattgatcaccatgaccttgttgattgcttagctcttccaggactagttgaatttgctgagaactttgattttagtgaagacaaaatcattaaatatctaaagaacgaactatcttcttttgatctgaaacaatatggaacgattgtgttaggatgcactcattttccgtttttcaaaaacagttttgaaaaactgtttgggataaaagttgatatgatttcaggcagtgtcggtactgcaaaacagttgaaaaaagttcttgcagatcgtaaccagcttggtaaaggatcgggctcaatcacctttttcaattctggccataaaattgtggaccaagaagtcatatcaaagtacaaaagattgtttgaaatattagatgaaactcaaaggagtcatgttggacattgaatgtaaatgaaaaagacaatctcctgaagagaaacatgaactaagaagcgggcttaaaaagcccactttttttctaacaaacaattgagttatacacacatatctgattacagtgttttctctctttcccctcttatttctcccccctctctatagcttttctatttcaataaaacacaagtctcgattgaaaagttatcgtaacatttacacttcacaggagatttttcacgattgcgaatcgaccgtttgccagatgcacaaagtcataatgtgtaaattctgtatctatgtgcatgtttattatggaattattttcataatgttttataatacaagatgatagcgttttctaattataatgatagggggaaataatgatgatgaaaaaaggtctgcttgcgggtgcgcttacggcaaccgtgctttttggcacatgtgcagtagatgtaccgggtattattagtccaaaaaccgcagaagctgcatcacagctaactgatggaatcggcgggagggcttacttgaacagtaatggtgccattcttgttacgaaaatccagcttcctagctccactcaggtttcaaatgggacagcctacatctactctggttttagcggaggcacagaatccgatatcgggtttcagtacagtgataaatataatgtatggaaaccatatatgaaagtcggttcaaaaggacaggatcaggttcagtacctcgaaggaggaagccaattcacgaatacgaaaggcttccgtcccggcagcaccgtacaacttaccatctacaaaaaccttaacggcaatacccgcgctacatactggggcacgaacaatgccggatacaacggccgtctcatttcagaaatcagcaaaacaaatgtcggctccatctcaaaatggaaagcgctcgctacagttgcaacaacagggtcacgccaatctatcaaatcaaacttttcaacatcttttacaaacatcaccatcgacaacaaagcaataacacctgtaattgatacacaagacttcgctaaagtaacagtctcaggcaacagtgtcagtttatccgttgtcaaaaattaaaacatgttaaacatacaatgcgttaggctattgagaagctctcgatagtcttaaagggggcttaacatgccccttttttcatttcaatttaactttcagttagcttcggtacatgccgtctatccccgtcttttatctgggtgaagtaagggcagctcgccccttctgaacctgttccatttgctcaacgcaaaaggtgtgcatcactgtcttaaaaatgttaaaacaaatagcagatggtgcactttatttttagatgaggcatgcttacgctcgatatgcaagtcaaatgattaagggtctgcaagagagagaagttttgggtgtactttcataaaagagggatggcttcatatagctcgattgcatcaggaagattagccaacgattggccgagaacaacacatcactttgaaacggattcattccaaaatcataagtatgatccaataactaataaagatcagttagcagtccagccttaaaaatatttttacatcaattaaactagcatcactatcgaataagctcgatctgcatatcatgtactatcctcttttaaggaaggtgatgttatgaggtcatttccattaatcgtagttctattcatcctattaatcatcgttgggacatctttctttggtggctattaagaacacaccttacctcatatccatcagacgccataagaaatctttatggcgtctgttttttattagatttaaacaaaaccattaaagtgggccatgcaaacacacctatggagattactgccacgacttctttgtgagggaattattcttccctttatggactattgtcgatcaaaagagaaagttgaaatgcatttttatggtgagatgaatcgaggcttagacatataaaaaaccgcaaagctttcttgaagaagctttgcggtttttgggtctcttctttgcttcatataagccaatagatttcaagcgtaatccactgccatacatccaatgattttttattttgaaataggtttcttctactcttcatgtgagatgactcaaggtatgccacgtcacaataatatggcggatactgaatggtctcaatcagttttttccccattctatcaattctccacagaaaaaatggctatggcagaacaactttcatagagtaatcatcatttaatgagccatcatctcatgggcaatatcgtgtccatccatttttgacgggtagtaagtaggccagtttttgacttcatcaagtaaagcttcacggtcgtccccccaatagagatggtaatgactagctttagtcgggtaaatactatgatcactaaactgaatatactgaggcagcccttctgcttttttagctagtttgaatatgtatcttacccctctattgcccgcatcataggttagaatttcgtatccgtcatacgtatacttaccagaatattcttttccatttttgaagaacgttacagtatctttctggattacaatacggtcaacatctgtttgatagccttttttataatactctttatattcttcagctgtcttgccgccttcgtgttctgatttatatgaaaacacttcgtcaagagtaccatcttgcaggtatggatatacagattgccaatctccttcccaatcagaaagtaagcgatcctttacttggctgtttttaaaatagccttcatatattttttctgtttcttcatcatgcgcatgactatgatcgtgagaatgttcgtgtgtatgactgtcagatgtttgctcttgcgttttggaagagtcttcttcaactgctgaggatgatgttgtttgattagactcacctgcagaagaaccggaagtctgacatcctgccaaaactagtaatgaaccaatcgttaatatgcctagccgttttgaaaataaaatgttcattccaacactccttttttattaaatcgaaaacattacgatttattatacatacatctcttgcaaacatcaaaggaaaaatgctcttcatgcggatggcctattttaaaggaataactgactatgttcatcagttattcctttaaaatacgaaagtctacgatatttccatatcgatccgcttcaatgtgacagcacccctcaagcagctgttttaattttccacgtccgcgttgtacccttgattttgctccggagtaagaaatgccgagcttttcactcaactctttttgtgataacccctggaaatcagttaactcgagcgcctctcgatacttttcaggcaaccgtttgatggtcgatcgaatacacacagttgcttccttggtgaaattttcttcctctgcactgtcattaaaatgtagaacatcaggcaatatttcgcttgttttttttgtacggtaaaaatcaataatcgtatttctagtgatccgataaatccagctgtcgatcttttgttcatcgatcagatttgggagatgcacttgtattttcataaatacgatttgcaagaggtcatcaacgatagattgatcgttaaccctatgtgaaatatatgtttttaacggctgatgaaattgatcccatagatcctctatattcatttgaaaaaacctcctataattttgcgtctgctttacatttgcttcgtctttttaatcgtaacaaagagcaaacaattgttgaatcaattgtattgcagctgttgccaaaaataatgataaaggagaggtttgttgtggagtatacctatttagggagaacaggattgcgggtgagccgtttatgtttaggcacgatgaattttggagttgatacagacgaaaagactgcgttccgtatcatggatgaagcacttgataacggcattcaattttttgatactgccaatatttacggctggggcaaaaacgcaggattgacagagagcatcattggaaaatggtttgcacaaggaggacagcgccgcgagaaagttgttctggcgacaaaagtatatgaaccgatttctgatccgaatgacggaccaaatgatatgaggggcttgtctctatacaaaatcagacgtcatctggaaggatcactgaagcggcttcagacagatcatatcgaattgtaccaaatgcatcatatcgataggcggacaccgtgggatgagatatgggaagcttttgagactcaggttcgctccggcaaagtagactatattggatccagtaattttgcaggctggcatttagttaaagcgcaagctgaagctgaaaaacggcgattcatgggactcgtcactgaacagcataagtatagtttattagaacgaacagctgaaatggaagtgctgccggctgcacgggatcttggtttaggagtagtggcgtggagtccccttgcaggagggcttcttggcgggaaggcattgaaaagcaatgccggaactcgtacagcaaaaagagcagatttaattgaaaaacatcgtttgcaactcgagaaattttcagatttatgcaaagaactaggagaaaaagaagcaaatgtggctttggcatgggtgctggcaaatccagttttaactgcgccgatcatcggaccacgaacggttgagcagctgcgtgatacgataaaagccgttgaaatcagtctggataaggagattctccgcatgttaaatgatatctttcccggacctggaggagagacacctgaggcatacgcctggtgatacattcattactcaatactgacatttttcttaaatatttatactgaactatcatattaagaaagacaagagcatgtttgtctcttgtcttttccacatcgtgctgaaaatgctggctaaacatcgacaaaaatgctgccgcttaaaaaagaaccctaaacaatagagtaactggaaagacaactggcttgatcagcttgggacccctttcagctgtatttaaatcaatcaaactaatgattcattggcagtctaaatattattattgtttctttacaaaatagtaatagcccctgtaatgattgctaacaacgtaataactaatgatgtaattacagcccacttaacggcaaacctttgaaatgaccccaagtccattttaagcatgcttactagcaatactgttgacgcaaccaatggactcatcagatgaaccggctgccccattatagaagcccttgcaatttctactggttctataccatatgctgaggcagcttctgcaaagataggtaccataccaaagtaatatgcatcatttgataaaacaaaagtaaacggaatactagtgagtgctacaataacggggaaaaaccctcccattgatgaggggatgatggatattaatgatcctgctatggcatccaccatctttgtcccggataatataccagcaaatactcctgctgaaaataccaataataccacggttatggcattaccagaatgctcggcgattcgctccttctgcatttttacattcggataatttatagtaagggcaagaacaaaaccaattaaaaataaaactgacggatgcttagttccaagcacaataaacaccatgatacttataacgaggaataaattaagatatattaagcgtggccttttcaattgttcgctctccaaagtagcagccatataagattgagagctgtcctttgttatatgtctaggctctaattgaacgatgcctattcgattcctctctttccttcccattagaaaagccagaaatatcacacaagcaatacctccaagcatggtcggaagtaatggcacaaagaaatctgaaggatccaaacccagcactgaaatcgctcttgtagctggtccgccccatggagtcattccgctaacgatactcaacgacagcattgctaatgtcgccataaccatgggattcataccaattcttttatacaaaggtaacattgctgagactgttatcatataggttgttgtaccgtccccatctaaagcgataagcattgccaagacggcagaccctatcgctattttcacagggtctccctttactatagataaaattttttctattagcggatcaaataaacctgcatcaattaaaattccgaaaaaaagaatagcaaacaatagcaatgccgctgaacttgcaactgtttgaattccttctaaaatcatgtcgccaatacccttaccaaaacctccaataagagcaaaaacaatgggagtgatggtcaaggcaacaataggcgagactttctttgtcattattaatattgtaaaaacagttaccatcgaaaaacctaaaatagtaagcatattacacctccaagaatgcgctttcaaatgacttttgattaacatatcttatacggtgtaataagttaaataaatatttttttactgtgtttcaaaaaaaattctatcataactttaaatggttaccatttgttcaccctttaaaaaatcaatgaatgctttaacgagtttgattcctaatgatttttgatcgtacattagccaagtatctctcattagaggcttacccttagcattatacagttccattgtgtacaaatgatcagattcctgcaggcaaatttctggtgctatggagtaaccaagaccatgctttaccatctctttgcaagtctcttgtcgatccacttccattgcaataatgggggcttgttttagattcgtatgcatccaatcttctataatcgtttttaaagaagcatccgttttatatttgataaaaggtaaaaaaggaagttgctctatcgttattggtttttttgagatgatatgtaatttttcccgtgtcagccgttcctccacccctttccagcgatggcttcctctcagtataccgacttgtacaataccagcatctaataatttcatgacatctgtgctccagcctgtttgtacactatattggacattaggatacatagtggaaaattcccttaataacttagggagcttatattgagcgaaattgcttgatacccccagccttagatgtccttgcacctctttgcttagattagagatatgatctttggtatcttgaagttcctgtagcattcttcttgcataagcaaccaagtgttctccttccgcagtaaaggtaattcctttatgccttttggtgaataattcaattccgaaaatctcctcaatctttttcaaccgataagtgatggaaggctgtgatgtaaataatcgttctgctgtttttgttacactttgttcttcgtgaagaattttcaataaaatccaatctttctcatccattttcatcttcctttctagtccttctttcacaattataaaagtttttttatcgaatattaagaaaacttatattttatttttatttttttaccttctacactaaaaaacataaaaaatactacctttaagatgaggatgatgacgatggtcaagacgaatgtaacaatcatgagaggcggaacaagcaaaggcgtttttttccacgaatcagccatgcctaacaataaaaacgaatgggagccctttttgcttgatgtcatgggaagtcctgataaaagacaaatagatggtttgggtggcggtaattcccttactagtaaagtggcaataataaagaaagcatatacttcggatattgatgttcactatactttcggtcaagtcagcatttcggaagaaaaggtggactttaaggggaactgcggaaatatctccgctgctgttggtccatttgctattgaagaaggacttgtaaaagcgaaagaaccaatgactgcggtaaggatcctgaataccaatacgaataaaatgatcattgcggaagtagaagtggaagacggtcaggtcaaatatgacggagatgttacgatatctggagtacctggatctggatctccaatctatttaaactttcatgatgccgctggttcagttaccggtcatttattgcctactggaaatagttcggagtttttagatacaagtcaaggccaaatagaggtgtctattatcgactatgcaaatccattagtttttgtggaagcgagcagtatcggcctggatggaacggaacttgcagaagaatttactgatctacagttggctcaatttgaagaattaagatccattgcggcagagaaatgcggctttgccagtcgattttcagctacaaagttatcgccggctgtccccaaactggctatagtagcaaaaccagagaaatataaagatagtacaggtgcttggcattcaagcgttgagatggacttacacatcaggatgatgtccatgcaaaagccacatcaagcactggctgtcactggagcgatatgtacaacaagagccctttcagtggaaggtgcaatccctgcaagaatagcaaaaaaccactctacaaaggttcggctagctcattcttctggtattattgaaacaatggtggagcccactggtataaagatcgtccgtaccgcacgacgtattatggacggaacagtttatacgcatggagactatcaaatgatgtagatggactgtgcaaaaagcctcccccctttccatcgttaatagatggattgaatgcgccttcttgcacagatccattgtaatcttgcatggctttaaaaaagcctctatattgttttttatgaaatcgccaaggtcctttcatgtatctgcctcaagcatgacataatcattatagagaaaattgaatactttttactgcaaataaaaagataccaacatcattggtatcttttagattgagttcatctgcagcggtttcttttcctcactgcttatttgattacaaaattaccgtactcgtttgaacgaacatgaatcggtccgtttagattatagttgttctccttggcgatagagcgaagcacgtccacacgggcaactgattctctccattcgtcacgggtgtcatgattggccggattcatcagatcgtcatagcgtacgtccaagaatttattcaaccacttcttctcgtctattccgtctttaggtgatccgcccgcttttttgttcgtacgtttaatcaaggcataaaaagagtcagggtcatcaccatcgccatgctgaataaccgtatcgtacatcacagctcttgccaatgctgtttttagtccggcattatccgatcgtttcatggcaggctgataatacaaatggtcatttactttgtcttgagcggcgcgaaattccttatcatttgcaagcgacttccaggcagaagcgaatcccttgagattgcttgtatcatcgctttcttccttggccagacggcgcaattcaggcagatactttttcagtttgttattcggaactgcctttgtgtatacttccactacttccaatgcatccccggtagccgttgtaaagcctgcccgtccgcatgtatagcctcgcccgtcatccaatcgctctacatatccatattggatctccgttgtgccgttttcaaagatacttgtcagctgttccgcccggcgcttttgatctttattcagtcccgccgcaaaaaccgtttcgctcatcatcagggtaaaaaacatggtgaaaacaagtaatgagatcgctgcttttttccaaaaatctgctttttgcatactgattttcatttcacttcccctttctaaatattgtaaatacagactcagtatacatgaagaaactgccctattgttgaaaatacatcaatttgtcaatattttgaatctaaagtaatatagcttgaatcttactctattcattgccaatcagccttagcccctctcactgggaaggtcccttgattttcatactgcttcaactttcattaacaagatgccataaggctttactctattttataatggaagtgatcatcgaaaatcgttagggaggtgatgtaatggcaagcaagatgagaatgccagattccgcaacgtcccatgcaaagcctactattgggaaggcgatactttgcatggggtagactttctaaaagatcgcccaagtaagcttttctgatatagtggctttgcaccttatttgacataaaaaaataaggagctggcagaaatggcatatgtaaaagcaaccgctattttacctgaaaagctgatatcggaaattcaaaagtatgttcaaggaaaaacaatatatatccctaaacctgaatcctctcatcaaaaatggggtgcgtgttcaggaacaagaaagctgatcgatgacagaaacgcttctattaaaaaagcatttaaaaacggcaaaaccattcatcaattatctgatgaatatcacctctctattgaaacaataaaaaaaattgtctactctaaataaacaaaacggaagcactgataaaaaataatcagtgctttttatatggcgagtttgtttcttagttatttcctgcatatgataccattggccaattgtgtaaagttaagggagatgagaagaaaggaaggtcctacaaatgacgataaacaatggaacgttgcaagtacccggcgcgaacatccactatcaggtgcgtggctctggtccaatcattcttttggtccacggaggaggcggtgatgccgacaagttccatcatgttgccaatcatctggctaactggtacacggttgttacttatgatcgccgcggccattcccgcagcaatctcgccaatcagattgagggttaccgtgtggaaacacacagtgacgatgctcaccgtcttctagccaaaatcaccaataagccggcctatgtatttggaagcagctccggggctgttatcgggcttgatctgtgcatacgccatcccgaacaagtacatgtcatgatcccacacgaaccaatcttattgcagcttctgcatggaaatgagctgaaacaagccgagcaattcatggaagaccttaagaaaaatcatcgaagtgaagtcattaaattaatgtcaagattagagacagacgaacaatcaaaggctgtcctgacaaagcggcttctcggcaattcaacgtatttcactgagtatgaaattcaaggaattctcagctatacattagatttcgaagcattaaaaactgtgtttacatcttcaccgatgaagatactcccagctggcggaagtgcttctcgggagctttttccttatcgttgcgcgaacgccctagcggaacaattggaaacagaatgggttgaattccccggaaatcatacggggtacacaatgtaccataaagaattttctgagaggttacacgacatgttagaaaaagaaaagaaacatacgtgttaaggattgattaaaattttcaaaataggacaggtgaaactaactatggaattggagaagatttcacgaagcgtaaaaagaacttttcactaacgagaacgcaatgtgagatgtttaaccaaagtgatattagggatttcatcgaaaaataggtttgtacattacgttctcctattgattatttcctatcttaattccgtattttataccattagatacaactctaaagcggctcgttattttgtcctcaacaacaaccagtgtctaacatcatgaatctcttttgaaaatcaccacaaatgcaggtatggaagacttcatcgcagcaaaaaccataccaactattgttgttggtatggttcgtcctagataggcccttaagaagagattctattgtacggagtatttagctaattgcatttgtaaccgacagggccgtctgaacctgtgtacacatatgtgtcagacacatatccaatattcacgacaccccgggaatctttccactggatttggtcccagatattactcgttccatacttccctgtaacagtcgttccataagcgtaacaataataaggaacacgggagccactcggaatggaaagcataataggataatttgtaccaggaccgctgcgcatattgacaggcgcaccgctgcttgttgagacagtaaagtactgaacggcaagtgcctgactggaaaaaatgaataaagatgcaatcatcacggttaacatactcagcattttcagtttagtcaatgtcatccctctttcttcaattccttcattttaagaaacgatagaacataggctaccagctgcatttaggaacaaccggaccgtctgagcctgtatacatatatgtatcagagacaaatccaggaacgatctccccgctggcaagcgtccgctctgtgtaattccaaatattgctcgttccatactttccagttacagttgtaccggttttgtagcaatagatcgggatgcgggttccgctcggaatggtcgttacaattccccaacttgtacctgggccgctgcgcatgttgacaggagcaccgctgcttgttgaaaccgtataatactgagccgcaagtgcatggctagaaaaaatgaacacagatgcaatcatcaccgttagcatacttagcctctttaacttattcaccttataccctccccttataaatgccgtacgtttgactttcttacatccagttaaggatttactttcagataccatgccccctcccctcccatatatttatcaatgtaccataaactagatctttcaaaagtggaattattcctatgttttcgacaattaaggatacaaaataaatggtagtcaggcttgatattgatggtgtgttacatttggctcttaatcatttgtccagtcggtaatcacgattgacaatcaggaaaaaggacatggatcaagcggcttcgtttccaccaattaactcaatcagtgtactgcttccttgtatccacgcttcttctcgattcatagatactccacctttttcaccaatcaaaaacggacaccatacaaatcagcgtaaatgctgcaagttcagtgtccgcaacctattatgactttgctttcttttaccagggcgtgtaaaaatgattaggtacgttatcaaacgttattctatgattttgcgagtcaaaaaatcataacattttatatatttcaatcagattatgatctggatctctgaagtgagcaactcgggcactccattccttgcgatcatgcggtttattctcacatttaactcctttttcgtgtaaatcgtcatacgttttatcaacatcttctaccttaaactgaagcaaaaattttgattgagcttctccttccaaggactttttttcctctccaacgatttcagccatcgtttctcgagataaaagctctattttcgtttccccattatcaaagagtgcatattccatttcattctctaaccaacttattggaagtcctaatgaatctttataaaactcgacgcttttcttaaaatcattcaccaacagtctaatttgtaacagcttcatatcgagtgcctcctataaaaccatacttttactggtcatccaatttaatgataccaaagaaacctgacagcactatgtcaagtttccatacttcacccttatttcagatttaagtgcagtttagtccatgtcataagaacgagcaaaaacagcgattcttaaaacaaaaaatgataccgagtgtattttctgtatgcttcaacttcatttcgggaaatgtaacgttgataaaaggaggttacatcaatatggatcatcaaacattggcagctcatgaggctgttgacttacatgaaatcgtgaactttaaaacactttgtatagcgaaatcaaagttaatgcaagggcttgtgtttgaccaagaactgaaggacttgatggaaaaagatgtacagcaatccattcaagaccttactgaattacaagcggtttatgagcgtgcctcatttcaggcccctgtccctcaaagccgcccaacgccaatcatcaattgaaagggaggtaagcctctttgaataatgatcatttagaccccattaattcgctgaatgtgcctgaactagcagacactacattcgcgatggattttcttatacgagctaaggaaggcgtaaggaatactgctgtagctttgacagaaaccgcttcaccagatgtaagagcactgcttcggaaacagctgatgcaaggaattgcgatgcaccaagagattacggaactgatgatcagcaaaaagtggttccatccatatgagctgagcgaacagtataagctggatcagctctctgcaaaaaacacgatcatggtcggcaatatgaacctctttcctgatgaaacaaatcgcaaagggatgtttgaccggacacctgatgaacactaacactggaggttttacagcatgaaggcagtaacgtatcaaggcattaaaaatgttgttgtcaaagatgtccccgatccaaagattgaaaaatccgatgacatgattatcaaagtcaccagtacagccatttgcggatcagatttacatttaatccatggattcattccgaatatgcaagaagactatgtcatcggccatgaaccgatgggaatcgtcgaagaagttggttctggggtgactaaactaaaaaagggagatcgggtaattattccctttaatatagcatgcggggaatgctttttttgtaaaaaccagctggaaagccaatgtgatcagtctaatgacaatggggaaatgggtgcttatttcggctattcagggcaaactggcggttatccaggcgggcaagctgaatatttaagagtgccgtttgcgaattttacccattttaaaatccctgaatcttgtgaggaacccgatgagaaattaagcgtgattgccgatgccatgaccaccggcttttggagtgtggataatgccggcgtaaaaaaaggcgatacagttatcgttctcggctgcggaccagtcggcctgtttgctcaaaagttttgttggctaaaaggcgcaaaacgcgtcatagcagttgactatgtaaactatcgcttacagcatgcgaaacgtacaaacaaagtagaaatcgttaattttgaagaccatgagaatacagggaattatttaaaggaaatcacgaaaggcggagcggatgtagtcattgacgctgttgggatggatggtaaaatgagcgatctcgagttccttgccagcggcttaaagcttcatggcggaacgatgagtgcattggtcattgcttcccaagctgttcgcaaaggaggaaccatacaaattacaggtgtgtatggaggcagatataacggttttccgttaggagatattatgcagcgaaacgtcaatatacgctctggacaggctccagtgatccactatatgccgtacatgtttgaactagtatcgacaggcaaaattgatccgggagatgttgtcagccatgtcctgccgcttagtgaagccaagcatggctatgacatttttgattcaaaaatggatgattgtatcaaagttgtgttaaagccttaaaaaacggaggttacagaaatggaatacgccttacacgaagtgcttgaggttcaggaaatgactgcatttaagacactttgtttgacgaaatctaaaacaatgaaagcactggtatctgatccgaagctgaaagaaatcatgcagcaagatgttgatatcaccacacgccagttgcaggaatttgcctctattttatctaatgcaaagcaagaatgaggagatgaataaatcatgaatcctatcatagaatatctgactggcatgaatgttctaacagaccaaatcattgctatggacttattaatttcagcaaagaacggagtcagaaattatgcgatggcagccactgaagccggaacgcctgaagtaaaagaggtccttatccgccatttggaagaagcactcgatatgcacgaacaactctcaagctatatgatggaaaaaggctggtaccatccttggaaccctgacgaacaagtcaagctgaatttaaaaaatattgatacagccattcaattgccaaccctttaacatacaatgactgatttgctgaggaacagtattgattggccacaactgttcctcagcttcaaaatgagcactgtttgttcgggtcctatgaccgtaaatagattaaccgcttttctccatctgatctccgataatgtttgcaaattctccaatccaaataaggaatcgtaaccacctctttttatgcgatctcttgatggagaaaacaggccagaaacaaaatccttcgtttttgacctgccctcttcacacgcaaagaatgctaccttctttgctccactgatccgtgaagactttccgttttaggcctgcttttgagctttgcctcattttcacgcaatttcccatcataatctttaatttttgtgtctaatctcttaattgtttcatcaatttctttccgcttctctatcagccgctgtcgttcgtcagccaggatattttttcgagcttctaccgtacggtcaccttcggtaaataatgttgtatattcaattagcgcttctatcgatagtcccgcatttcgcatgcatttaatgaattcaatccatttgatatcttcttcatcatagtcgcgaatgccgctgtcttttcgttttacaggcgggattaatcctacacgttcgtaatatcggagtgttgcggctgtcaggccaaactgctttgccacctgagcaatattcatgatcttcacctctctatcctgtatgttgtgaaggtaacacttaaagttaactttaagtcaagctcaaaacaagtggttagctgctgaatctgggtttatatattcgggacttgccttaaagcacactttaaactctatacttctccatgcactaaaaacagtgtagttggagggattgctgaatggcaaataaacacactgccggaagagaacaattaggagaatttgcgccaaagtttgctgaacttcatgatgatgttctattcggtgacatttgggcaagagaagaagaactttcatcccgggatcgcagcatgattacagtttctgcattaattactgactgtttctcagcttataaatcaggttcattttaaatggtttttttaaaaaacccttgccttaaagcagactttaaggtttatcgttatgttgaagacaccataaaacataaataagtgcatgtttttatttacaacacttatgatgaagaaaggataggttcgtatgtgtaatcaacatcaaacccgtgtattaagcgtgtcacatgcaaaagccaaatttgaacaaacgacgattgagcgaagaggattacggccgcacgatgtcttaatcgatattaaattcagcggcatttgccattcagacattcatagcgcttttgatgaatggggcggtggcatcttcccaatggtgcctggacatgaaatagccggtgttgtaacagccgttggaacaaaagtcaccaagttggctgtcggggaccgcgttggtgtcggctgttttgttgactcttgcggagaatgcgaatactgtctcaacgcagaggaacaattctgcacgaagggtgttgttcaaacgtataactcagtagactacgacggaaaccccacttatggcgggtacagccaaaaaatcgttgtcactgacagatttgttgttcgcataccagatcgtttggaaatggatgttgccagtccgctgttgtgtgcaggtatcacaacgtattccccgctgaaacactggaatgttggccctggtaaaaaggttgcgattgtaggcgtaggtggccttggacatttggcaattcaatttgcacatgcgatgggtgcagaagtaaccgtcctgagccgttccatgaataagaaagaggaagctctggaactcggtgcaaatcattactttgcaacaagtgacccagccacattcactgcattggccgggcgttttgacgtgatcttaaatacggtatcggcaaatctcgatgtagatgcctatttatcaatgcttcgtatagacgggacacttgtaagcgttggagctcctgccaagccggacacatacagtgtgttttccctaatcatggggcgccgcagcattgcaggttctctagtcggcggaattcaagaaactcaagagatgctggatttcgcagctgagcatggcatcgaacctaaaatcgaagtcatcggagctgaccaagtggacgaggcatacgaacgtatcctccgaagcgatgtccgttatcgatttgtgattgatatttccacattgtaataggttagtccttatatgggctgccgcttttattgaaactcacgaaaaatgatctctttaagcaaatattttgaaggccggtcaatcttcctgttattctatgaatagagagttattaggagggttttttatgagcaaaaaaattgcagttcttgttacagaccaattcgaagacatcgaatatacaagtccggtaaaagcatacgaagaagctggctacagtgttgtggctatcgatttggaagccggcaaagaagttaccggtaagcatggcgagaaagtaaagattgacaaagccatctctgatgtggatgcaagtgactttgatgcacttttaattcctgggggattctctccggatttgcttcgtgcagatgaccgtccgggtgaattcgcaaaagcatttgtcgaaaacaaaaaacctgttttcgcaatttgccacggcccgcaagtactgattgatacggatcttctaaaaggcaaagatatcacaggctaccgcagcatccgcaaagatttaatcaatgccggtgcaaactacaaagatgcagaagtagtcgtcagccacaacattgtcacaagcagaacacctgatgatttggaagcatttaaccgcgaatctttaaacttgttaaaataacaagaaggcacagactgttcgggtctgtgccttttttaaaattaagactccttcgttacattctgaaagacagcagtcgcgtcccacacattcaagccaaattggccttctgaaaatacggaatcatgtgcatcaatcacaagacgatcatctaaatagattttaaagcgatcgccctcggcctctgttttcagatgatactttttattaacgtctatcggtgttttgtattcagcaatgacagaagcagcaccgttctcaaatttaaagaatttcactaggtcatgcttcgcatccacattggcaaggtaaccgtttttggcatctttgtcagagcgaaacattagtgctcctgcccctcttccgtttccatccttaatggtgatatcagattcataagtgaagtctgacccggatgctgaagacaagataaaggaatcgccgtccgacctcccttgtttcccctcaattgtgtctgcccacgtgccatttacagtcgtccagccagtcatattggacataaaaggtgtcgttccccataccttttttaaagggtgtatcgttaaagattttacctttacaccgccatttgcagcatataattcaagccctttgcttgatcggtctgggagaataatatccgttatgacctgctttccgtcattcccaaatacttcaaccgaggagcggtcaacaaaaatgcgcaacttaaccttcccatttaccggcttcaacggggctgtttcttttccggtgttaaaggccggattaaaggtgtcgttgcctgactcgctccggtcaacgaacaatttggcgttccttcggtcatagccgaccttcgtaaattgattttcacctgttcggaccttaaaaccaaattcagcagctgaaccagggcttactttaaattctgcatttatttcataggcatctccagattgccccgctaacacattatgacttgcaggcgatatggtcagattcttccacttcttagaggttccgcgaatggtttccagctctttcaccggtgtttggaccactctaaccccttcggtaaacgctttcaattttaactctcttggaatggacgttgcacttctccatggggatgtcggaacatcattcgcatattgccaattgctcatccaccctaaccatagccggcggctgtctgtggatggaatatcagaccaggatacagccgcataaaagtctctgccgtaatccgtccagagaactttgtttggcgggttttcatttttaaaatgagttccatcaaagtcccctacaaaatattgcatgcctgatcctcccgagaccgctccgtttccgacactgacctgcatgacccatttcttttgattcggattgccgtctaccggaagctcaaataaatccgggcattcccatactcccccgtggcttccttgatcctgtccaaattcacttgcatacgtccactgcttcagattttttgatgtataaatgaggattcggtcaccggccgcaagcaccatcacccactttttttctttctcataccaaaagacttttggatcgcgaaaatcttttttacccgggtttggaatgacagggttgccagcgtacttcgtccatgttcttcctttgtcgttgctataggcaatactttgcacttgatggccttcccgatcctgtgtataaatggccacaagcggcttctctttgcctgtttgaaaaccgcttgtgttatttttatctacaactgcgcttccagaaaagatcgtgcctttttcatccggatacagcgcaacaggaaggtgttcccatgtaaccaaatctttgctgacggcatgcccccaatgcatgggcccccactgaagcccgtatggatggtattgatagaacaagtgatattccccagcataatataccattccgtttgggtcattcatccagtttgcctccggtgtgaagtgatattgaggacggtaatcctcatcatagtagcttgaatcggctgcatctgccgaaaatgccatagtcaacagcagggtgaacatgatcatgacttgaatcagtctctttttcatttgttccttcgctcctctcttcatgtttgaacactttcaaaagagactgctgcgcaagctggtccgtttctggcaattctcctctgtttcactgttatccgaatgatttatatatgaaaagactgctgcagtttctctctctttccttcacacaccttatgctaagaatccagcccaatacccgagaatcccgatgacaaagatgccgcaaataatgagaagtggattcacccctttgcgaagcatccatgccaccaataacgttaatccgagaggcagcgcccccggcataatgctatctagcacgttttgtaccgtttgaacatctacttttccgctttcatccttaatcctggatacaacgattggaatgttgatggtggtccatttggacacgagagcccccataacaaataacccgagaatcgaagcgccctctgtaagcttttgaatgcgattccccgctaaatcctgaagaatctccattcctttcacatagccatactttaatccgtaatattttgtgcttaatcttatggcattcagcaagaaaaagaatagcaaaggaccggcaatgtttcctcctaaagcaagggaggctcctagcgcagctaagacaggacgaatcgttccccaaaaaatcggatcgcctacgcccgctattggtcccatcaaaccgattttcattccgcttatcgcttttccgtcaattcctttattgttcgccatttcttcttccatggctgccgtcacgccaaatataggcgctgtcagccacggatgtgtattaaaccattccaaatgccgctgtaaggcttcgtttcttttcgctccgggaccgtacaattttttgatcgccggtatcatgacataacaatatcccattgcctgcacacgttcgaagttaaaggaaccgagtaaaaaatttgaacgaataaacatgctgaaaatttctttcttcgttaatcgtttttctttctccattttttcttccccctcatcgtttaggcatcaagatcatcatcatcgtcatcataaacagcaacactgccactgtctgatgcggccgcgactgctccgtgagcgctttgtttttgcatcacctgctggtataaaagcgccagacagagaccaagggctccaaatcccactaagttaaaatcggtaaacgccgctaataagaaaccaatatagaaaaatggctttaaataaggaatattcatcatattgatcaccatggcatacccgacaaccacaataatgcctccgcctatttgcagtccttttgtaatgacatcaggaatatttcccaggaacgcctgaacagcgctgacactaattaaagcaacaatcaatgtaggaatcatgacgcgcaaagcttgaaacaccatcgcggtaatatgcataatttcaattccttttatatttcccgcttttgcatattgatcagcgcggtggatgaaaaagacagtgatcgtccgaacaaaaatcgtcagcgcctgacccgcagctgctaaagcaacagcgacagcaatcccttcgccaattccttgatcagcggtaataactaaaatggttgagatgacagaggcgatcgctgtatcaggtgccatggcaagcccgacgttcatccagccgagcgccatcagctccagtgtgcctccaagaataattcccgtttttaagtccccgagcaccaagccaaccaacgtacaggccactagcggccggtgtgtctgcccttcatccaatacacttgcgattccggtgattgctgcaatgattaacaacaaaataatttgtaatgaagacatattctcatccccttgattattttgttacgttccgtaaaatctgtacaaaatcctcactggcatctgaaggcagctgcctcaattccagtttcacgcccttgtcacttaatgtttcaaatgcctttatatcttgttctgtgacactgactgattttgtgatttgcctgcgatgattttcaaaacgcattcccccgacgtttacggttttgatcggtacacctgcttctataagagatacaatatcggacggattttcaaacaagagcattgccgttaccccttcgtagcgcggactatgaaatgcttttgccattttagaaaccgagacggcactcgcctttacatttgaaggcgcaacagaaaggatcagcgtttttctcatttcgtcctgagcaatatcgtcggagacaacgatgattcggtcggctgcatggacttttatccaccttgtcaggatttggccgtgaataaagcggtcatcaattcttgctaacacaatgttcatcataattcatcctctcttgtatcttgattggctgtttttactttttctaaatgttcactgcacacttgaaagctttgctgactcattgcttttaagttgttcagcaaatctttgagagccagatgttctctcaggcttaatacctccagcagaatcggcaggtttacgccggcagccatatccattctttgatcctcagcaataaaggaagctgccgcgttatatggcgtccctccaaaaatatcgactaaaaaaagcacttcatgttcttccgggatatccttgagcgcctgatgatatttttcttgcagcgtttgtattccttcccctttgaaaaacggcactgcaatcaggttattttcttcaccgaatatcatccctgaagactcttttaatgctatgggaaaatctccatgaccgctgataataactgaaatcatatctattgctcctttcctgttttgtacatccatatataatgcaaggatcgtgccaacacagttgtgttaagcgttttcattgttatttcagccaatagcaatttgttgttgaaacacttaaaacgaaaaaaataaacctgtattaaaatggtgttccatttaatacaggttcatatgaaaaaactgtttttaaaacagctggccatgcacttcttcagcaaatatggcggctataaataatttttcatcatcacttatgcgaagtccgagcttttcttcataaggggctaatgttcgctctgtcacgtacaccatttccttcagctgatcattgatctcttcttcctctgagaaagcgatcggattctgcttaattaccctttcaaaggcgaaagccgtgtgcataatgactttgatcaaaaccgcattattgaaaatgacccccagctcatcctgaacggtttgcagccactccaataacatgtcgatcacatggtggggattcaagaagacaaggtattttttcaggctatcctcgcaaagctccctgacaataatatttgcttcgttcaatccattgctcaaggagatgcttccttttgtaatcgcctgttgaatcagcttctctccctccccttcaattaacacttctaaagatacatgcggagcattgattttagggtctttcgttccgactgtcgcaaggatttcatactctttttcgatttcttttatgctgttggccagcttaatcgatgatacggtcaatatgtgaatgggggtatcggaggccttgtttacgatcgtggttagaatgtcttccagctttttggccgttccgctacccgtcgtgcagatggataccaatgccttctttttgccggatgccgctggctgacgctcccacaactcgataaaatccttcgtgaccgattgatagatcgcatgcaaatttaaattcaaatagttgacctttctgacagcatccagcaccattgaagtcgtaacattgctgatcgttttaatagaaatgcctgtcttttcctccagcctgctttccagcattgcaagcgaccccatatctaccagcattaaaacaccttcaccttcatcaacctgtttcattttttctgctacgcattcaagaatgtccgaaggtgaaacagtaagcggcatgtcaactgctgcaatcggcgtactccctagcagttctgtcgcgacttcaaccattgaactcgccgtgctgtttccatgagctgccacgataataccgactcttttgttctcctttaacgatttgatggaatgaattaacatcgttaagtagatgacttctatttcaggaatagccactttaaaatattcctgaattttatctttaaaaatcatcgccacccgatattctttcacatgggtatcacgaatttcatctgtctcctgtgtattcaaaacatcaatttgctttcctcgctttaaaaatgcgtcaatatgcatactcaagaaataaataaacttacggtcaaatgtgcaatccagctcatgttcagctatttcttttaactgttttgtcatttgaatcacatcgtcttcaacgaatgtcagcaggttgtctttttgaaaagcttgatgatgaaaaaaacttctgacatgcaaatggacatcagtcaagatgtactggttaatatcctttttggataaaccttctttcataagcgttttcactttttcctcaatcaaatgatataagttaaatgagaggtcttcgtcaatttttgttgtttcatcttctacaatcggagagataatcgttgtaatattgacatattcagaaatggctttgcttctttgcatgtttttgctgctggacatccattcttgcttgatttcatcaggcagatcgcgaacagtcagttcaataacttcatttctgtcaaggttatgcaaaaatccgtgtgcgcaaactaactgaacatttgatttcagctgtccgacattcccaaatttcgcagagtgaataagcgcattatagacatcgatatgcacactcagattcttcttaattcgctctgcttctttccctaataaaaacgtcgtcagatccactctttcattaagcgatcgttcttcaagcgaaggaatatgaatggtcattgggattcttcgcaaaaacgttttcaatagtgcagaactcggattttctgtagtcgcacaaataaacaatacgttcgatgttcgtttatgttcagattctccaagcctgttataagaaccgctgtcaataaaataaaacagcatttcttgtccctcgggagggagacggtggatttcatccataaaaagaatgcccccattggcctgttcgactaaacccgccttatcctcggcagcacctgtaaatgaaccttttttgtgtccgaataattgagaaagcaataattgagggttgttgtagtagtctgcacagttaaatgtaataaatggtgcgccggccttcaatatgtcagagtaaatggcaaactggtaaattcggttcgcaaaaagggatttaccggaaccagtcggccctaggaggagcatatgcagaccgttcggcggataaaagacagctgcttttgcctgggagatcgctttcttcaaactcccttttgcccctatcataagctctaggggattcgtggaaatgtgttgatgattttgctttgaatttccggaaaacgcctgaaggtctttcacttccatcatctctgtatcccatttcttgttgaataatttttctgctatctcgactgggatgtatcttacaggaaatgttttaattttgatgacctttttggaccggacgagattgttcaattcaaagctgacattggaccgctccattttcagctgctcggcaatctcctttgctgaattcccttgtatttttaaaagatgatctaaggttgaatcatgaaaattatgcttgagctgatggtatattttatctattcttctcacgtctatcatcctttgtccttattagataagccattaacaagaatatttcgaaactttatagtccgcgttgagatttacacgtttaaaaaggtctctatagcagattgacaaagctggcttttatgcgtatatgtttacatgttgaatcatttgcacctcatattagtatgatagatgctcagttctggagggccagtccccttcaaaagtaataatcagtaaacagtttatcattctcggggaatgtaatgatgtcaaaataatcaatgacaaaaaatgaatcttatagatcatgacaaattacccaaatataaccccttaagttcgttcacaactaaaaagacggacactctatgtgaccgccacagtattacaatttgcaaaacttcgtcatttttgcaatccacattggaggttaaggaatctgtaagcttaaaaactttatctccgatcctatcgatttgatccccctgccggcctcaatcatagtgggtatgcaattatacaaatcgttaccgattaaaactagcctgtcagattgtccaaatgactttcctgttttactctgctattcaggtagaatcacgagtgaaaaatagagccacaagacatgtaacagcacttaaaatagttttaaaatttaaaaataaaagtatctattcttttaaatgttataatatccgataaaactttactcatctttttattactggaggaaaataaaattgataggcaattctagcaaagacaattttggccagcaacagaaattgtctagaggccttaaaaacaggcatatacaattaatggcgattggaggtgcaatcggtacaggtttatttttaggttcaggtaaatccatccattttgcaggaccatccattttatttgcttacttgatcaccggcgtattttgctttttcattatgcgttcgctcggagaactgctcttatcaaatgcgggataccactcttttgttgattttgtaagggactatttaggaaacatggcagcatttatcactgggtggacctactggttctgttggatttccctcgcgatggctgatttaacggcggtcggcatttatacgcaatattggcttcccgatgtgcctcaatggctgccgggtcttcttgcgcttattatcctgctgatcatgaaccttgccaccgttaaacttttcggagaattagaattttggtttgcattgatcaaagtcattgccatactggctctgatcgtaactggtattctcctgattgcgaaaggtttttccgcagcttccggccctgccagcctcaacaacctttggagccacggcggcatgttcccaaatggatggcatgggtttatcctatctttccaaatggtcgtcttcgctttcgtgggtattgaacttgttggactgacagcaggtgaaacagaaaatccccaaaaagtgatccctaaagccatcaatcaaattcctgtccggattttacttttttatgttggcgcacttttcgtgattatgtgtatctatccttggaatgtgttgaatccaaacgaaagcccatttgttcaggtcttctctgcagtaggcatcgttgtggctgccagtttgatcaattttgttgtattaacatcagccgcatcagctgcaaatagcgctttattcagcacaagccgaatggtctattcacttgcaaaggatcatcacgcacctggactattaaagaaattaacttcttctaacgtgccaagcaatgcgctgttcttttcatccatcgccattctgattggcgttagtctgaattatttaatgcccgagcaagtcttcacgctgattacaagtgtttcaacaatatgcttcatttttatttggggcatcacggtgatttgccatttgaaatatcgaaaaacaaggcagcatgaagcgaaagcaaacaaatttaaaatgcctttttacccattatccaactatttaacacttgcatttctcgcgttcattcttgtcatattggcactggcgaatgatacacgtattgctttgtttgtcaccccggtctggtttgttttattgattattttgtataaggtgcaaacccgcagaggacataaggtgaaataaaaaaaagacaagggatactcactcccttgtctttttatatgtgtcaaacactaaattaaactttggtttcaaatttcattcacttcatttaagtgttaactcaaaccagttttgatgccgaaacctactaatattattccggtaattttttgaaacactttctggaacttcgagtttttcatccatttttttgcgtaatcaataatataaacaagaaacaggaaccacaacaccgctaataaggttaggattgaagctaaaatgatgagctgctggtttatatttccgttcaaattgataaattggggcatgattgtaacatacaccaaaacagttttaggattgagaatgttactgagtgatccctgcataaaggaagttttataataacgtttcggagaacttgccatattttttgcttgggattgcatgtcatctaacgaaaacatacttttagcaaaaaaactttttacacctaaataaattaagtatgccgctcccaaatatttgatcgttgtgaaaagaatcactgactttgcgattaccactgataatcctaaaatggcaatcaccgtccaaaaggaaagtcctgtcgccaatccgagaatgttataacggccggctttcggaccatacctaagcgtatttttcatcacaagcatcgtatctgcccccggtatgataaccatcatggcagcgatcggtatgtatgcgagtaagctgtgcattgttctctccccctttaaaaatcccctcaatcatatagtgactacaaaagtaactacttataaaagtgtatcaatgcgtttggaataaatcaatatgatttgttaaaatagcgattactaaggcagcgattgctctttatattggaggatatatgaaagaaaatatgttagacattttaaaaaacctcaattttacagaatatgaatcgaaagcgtatttagcattattgcaagaatcacctttaacaggctatgccgttgccaaaaaatccggagtgccccgttctaaaatttatgaagtattggaaagtcttgtcataaggggagatgtttttgtcagtcatggaaatacgcctcagtatgttccagtccccgcaaaagaactgattaaaaaccgccggctcaaagcggaagagcattttgatcaggctgagaaatattttgaaaagttcgagcagaccgcaaatgaccgggaaaacatctggaatatcaccggccgcagtgaaattcttgaaaaggtgaaggcttgtatcttatctgccaaaaaaagaatcctcttagaaatatggaaagaggattttaaggagatagaagcagagctcaaacaggcggcagaacaaggcgttattgtcaccattattgcgtacggagacatcgtatctgattttgccaatgtttaccttcatgatatgagcagtgaaattacagaagagtatgacggacggtggcttgtctatagcggagatgattcagaagtagtagcgggcattgtctcacttggcaacgacagccgtgctgcatggacgatgcatgtagggttagtcatgcctattactgaagtgatcattcatgatctgtacctcatggaaattctgaaaaagcatagagagcttttagaagagagcttcgggaaaaatctcatccagttgcgccgtaaattttctattcactcagatttcaaaaaacattatttggaataatgtttgtcatctcttaccccaaaaacaaggcttgtacaaaacaagccttgtttttttatgcataaaccccccatgctgatttacttctctcttttaaaaaatgtgattctgcgcaaactatttttcagcctgccgcgtctatcctaggtaacagcctacgatatacgtatattcaaaaaggagccctttattgcaatgaagaaaaaacaaacaacaaaagcgttgcttgtcacatgcataactgaccataagcaagatttctacaggttggctttcagttatgtgaaaaatcaagatgacgcattagatattgttcaggaatctataaaaaaagcgctgagctcagttgaaacggtcaggaaccctgagacgataaaaagctggttttataaaattttagtacggacagccattgactttttgcgcaaacaaaaaaagataagagtgatggacgacgaaacgatagaatttttaagcaaaggaaaggaagaccattacaaggatactgatctccatgaagcgcttgacgaattgccgtaccgctataaaaccattattattttacgtttttttgaagacctcaaattagaagaaattgcggaaattacaggagaaaacacgaataccgtcaaaacgcgcctatacagagcattgaagctgatgcgcattcagttgacgaaggaggatctttcttaatggataagagattacagcaattaagagaagaatataaaaatgttcagattcctaaagaattggatatcattgttgaaaaagcccttcagcaagaaccaaaaaagaaaagaatcgttatgtggccgacatcagcagcaatcgctgcagctattttattcactgcgcttgttaatatcaacccggacgccgctcaggctatgtcaaagatccctgtcatcggcaaaatcgtcaaagcgatcacctttattgaaatcaaagaggaaaaagaccaatcaagcattgatgtcaaaacacctgctttgtccgggctttctaataaagagcttgaaaacagcattaacgagaaatacttgaaagaaagccagcagctgtataaagagtttatacagtccacatccaaaaacaaaaaagggcatctcagcatctacagtgattacgagacggtcacagacacgccagatttactctctatccggcgcaatattgaaacaacacaagcatcttcctacacacaaagccgttatattacaattgacaaaaagaatgatattttacttacattaaaaagcttattcaaagatgagcgctatatcaaagtcatcagtcaaaacatcaaagaacaaatgaaacagcaaatgaaggaagatccaaataaaatatattggctcactgacgaagatgcagaaccgttcaaaacgattcttcctgatcagacgttttacattactgaagaccataaacttgtgatctcatttgacgaatatgaagtcgcccccggctatatgggcgttacagagtttacaattccaaccggcgtcatttcaaacttgctcgtgggagaacgttatattcgataaaataaaaacatccatctaagattatggatgttttctctcttctctattcgaggtcgtaaccccgctatcaaaaacaacgagaatatttgcatactattggaggaatacccatgtatcacaagacacagcatcatcgatacattcctggacttgatggccttcgggctttcgccgtcctgtcagttatcacttatcacctaaatttcaattgggctaacggtggttttatcggggttgatatcttttttgttttatccggatatttgattacatctattctattaccggcatatggaaatgatatcaatcttgattttcgggatttttgggtgcgccgcattcggcggcttctcccggcagcgtaccttatgatcttttccactgttgtgtgggtcgtattgtttgatcgagaactattgcacactgtacgtggagatgcgatctcttctctcttttatatgagcaattggtggtttatttttcacaagctatcatattttgatagtttcggttccccatcacctctaaaaaacctttggtcgctggcgattgaagaacaattttatatcatatggccgatgtttttagttgttggaatgtacataatgaaaagccgcgccagattggctgcggtgatatcattgcttgtgctttgttcagccgtgatgatgagcgtactgtatgaacctggcggagatccgagccgcgtttactatggcacagacactcgttcgtttgaacttctcatcggatgtgccttggctttggtatggccgatgaaaaggctgtcttccaacaggctgccaagcaaactgaagcacactttgcacgccactgaatttttggcattttgtattttagtgttgtgtgtctatttcacagatgaatacgagccttttctttacagaggcggaatgctattcattagcgtgactgccgcaatccttattgcatgtgtttgccatccgagcagctttttaggcaatctgctttcatggaggccgcttcggtggcttggaacgaggtcttacggaatttatctttggcactaccctgttattgtgttaagcacgccagttcaagaaatcggaaaccctgttttttggcatatcgtgctaaaggtcattgtgacatgtatacttgccgagctctcctaccattttattgagaagccgatacggacacagggatttaggtcattttcccgccgtgtttttatacatagaatcaaggaatggaaaacgacatctgtcatcagcaaaatgtcaattggtttcattattttcgctatacttatttttgcaggcgggctgtcagggctagccggcgagcaaaagcaccctaccaaatggacctatagctcacaagaaacaaatgctgacaccagccaggcttctggggataaaaagaacgctgcagcagataaaaaacacaatcctgaacaaaagacaacagattccaatcagggtcaaaaggaaaacaaagatagtgggcaagagactcataaaaagaaagacacgcaatcccaacagttgaaaaaaccagcagacactgcgaaagaagttttagctataggagattccgtcatgcttgatatttcttcacacctgcgtcagtcattttcaaatgtgacgattgatggaaaggtagggagacaaatgtctcaagctttggaactcgcaagggaatacaagtcttttaatcagccgaacaaggctgtcatcattgagcttggaaccaatggctattttacaaacagccaaatcgaacaactgcttcaatctttctcaaaagctcatatttatcttgtcaatacacgggttccccgccaatgggaaagcaaggtaaatgaatctttgcagcaacaggcccacgcacatcaaaatgttacgttagttgactggcatacagaagctcttcagcatccggaatattttacccctgatggtgttcacttggttcctaaaggggcaaaaactttgactgctcttattgttcaggcgatgaaatcgtaaaaaagagatcctatacagatcacttttttactttagtttctgatcgttgattatgtcttctttcagcaaggcagcccttatgtttacatgccgtttacgtaagggtaagccaaaattgaatggagggatgataatgaaaggaaatgaagaacatgacatccaaaaagagttgaaacgatatgagctttttttcaaaaaacgatataaggttctttatacagtaaacgattttatcatcggtgctatgtttctcgttggaagttttttctttttttatgaccggttaatgtcggcagggatatggctgtttgcgatcggaagtttgctgctgttaatcaggccgaccattcggctgattcatgactttcattaccgtaagcatgtggaacagcaattcaagcatcaatcttcaacagatgactgatcttaaggaataagaaagaacaaaatgccaaaagcctgagtcgaaaatcaaaaacaagactttcagactatttatttttaaaaacaaggtaaaaagaactaaacttttgcctctgcatgccgatatgaataataaggccggcgcgatactccctataacatccttttcagtagatttcattatcgtgccggttttctcatatgcaaagcaatcccgccaatcagattggcgggattttatattttacattcctgtccaaacgtctttcacataacgtctttgatcttgcagcttttgcagccatacagctgattcttcctgacttgctgctttttcagcttcatatgccaatcgcaaagttctctctacatcaggagccatttgcgatccatcaccgcatacgtaaatatgagcccctttttcaatgagtgtcatcaatttctgcgtatcttgcttgagcaagtgctggacatatccttttggttcgttttcgacgcgcgagtagcatcggcggattgtgaccaaaccgtcctgttccgcttgatccagctcttctctgtaaaggtcgtcatggtccgggcggcggcagccgaagtataaaagtgcttcaccaagggtgcttccttccttcttcaaaaccgatcttgcctgaataaagcctctgaatggcgcaattcctgtgcccggcccgaccataatcataggcgtttcaggatcattcggcatctgaaatccggactgcggcgtacgaatgaagcaagctgctgcatcacctgtattcaattctgctaaataattagaggcgacaccccggtattcacctcggccgctccatgctgaggctttcacaactcctaccgtcatgctcacgatatttgcatgaactttcggtgagcttgaaatggaatagtatctcggttttagtgatggcaaaagtgctaaaaaccgttcaaacggcatttcgcaagcaggataatcctctaaaaaatcaagcatggtaagacgttttgcaagtacctgctctttgtaaatgccatcatctgaaacgagctgttccagctctttttgatgcggcggacaaactgtataagaggccagctcccgaagctgaagccttgatgccggttcctgcagctctacataggacgacaataaatccactactttgattggccgatccatcggcagatgagccatatgagcgcttccgcttacttttatcacatgattggactgcaaaccgaatcggctgagaacccgctgaacaagctccctgctgttctttggcaggattccgatatgatcgccttctttatatgttttaccagccggaatttccaattcaatatggcgggttgaacgcgtgctggcagctgtctggagttctcgattctctaacacaatcccttcaaacgcgccatatgctttagcaaccggcgtttccgtcgcttcactgagaaaagtaatcgataatgaaggcctgtcttctttctgggctatttcgttaatatcaaatgcgtccatcgtttccttccagaagcggttttcccaagactcgcggtggctttcaaaatcatcggcggcgtcaccttccccaatcgctgttaaacgcgatgccccctttgctttcatcatgtcatcaatcaggcggggaatccgctgatacgtgctggcccagctccggtttccgcagccgaataccgcataggaaacacctttcaattggccttcctcaagctctttcagccactctacaaatccggcagcattatcaggcggcgccccattataagaagccgttacaatgacgactgccccttcttcagggagcttgccgatataatcatcaagcggagccgtttcagctgtaaagcccatctggcggccttgagcagccagttcaccggctattccctcagctgtcccaagatttgaaccaaaaagaacaagtaaaggtgtgccgtgtttaggtttggtttcttttggctttgtttctgctttgatgtctgcctgttcttttctctgtacattgattgccgctgtttttcgcggtttcacagtaattttaaaatcatccggcttgatcgttaatgcttctttgatttttagttcgtagccagtatggtttatcaattcaaaatgctttaatacaagaccgagaaccattgtcgcttcttgaagagcaaactgcatgccaatacaagcgcgctgtccgtttccaaacggcttatacgcatggtgagggatacttgaaggatcctcaaaccgttccggacggaaatcttccgcatccggtccccaagcgttttgatcccggtgcagttttggaattaaaacagtgactggctgccctttgctgatcggatattccccgcctagaacagtatcctccttcgcatatagagaaaaagccggagctgttggatacagtctgagggtttcatttaaaaccatccgaatgtatttgagctgctggatttgtttatattcaggcgtgtcatccgttaacacgcgatccgcttcctcctgagcttttttcagtttttccggatgtgtaagcagacaataaatcgcaaaggatagcaacccgcttgttgtctcatgtccagcaattaaaaatgtgatgatttggtatcgaatgttttcgtcatccagcgtttcacccgttactggatctttggcataaagcatgagagacaagagatccttaatgttttcatccggattcgcctttcgctccgctatcattctatcaaccagggagttcatgacttctatatccttttggaactgcagcttcgttttcaccatcattttatcttgcaggcccagtcttttcgattgattcatcgcctcttttaaggcacggagcatactggtgataaacggatgctgtgaatcacggtaaaagctgttgaatcgatagttaaacccgcataacccaatcgtatcaagcgtcagacgtgtcatatcgtccgctacatcaatttcttcattagggtttaaccggctccacttttgaatcagctgggttgcgatatccagcatcatagaatgatagcctttcatcgctttttgactaaaactcggcagcaaaatgcggtgggctttttgccagttcggttcgtgcgtccagcttgtaaataagccatctcccccgaactcacgcaccttttgcaagcctttgccaaggttcttgtcaaagcgtttttcatcacacacttcagccacaagattgtggccggacacaaaaacactggatactcccggaaaatcaaaacggaaaatcggtcccaattcatcagctatccgccataaggattgagaaagctgttctttttccagatgcggaagattttttaaaggtccgtatgttttgggctgaggtattgcgcttgcctgtttcattaacatctccctttcctatttttgtgatgaatgaagcttaatggcgtcccagcagcattgttccaattcagtaattaaatcagtgtccatctctatatcacctgtttgaacgagctgatatatcttgagaaacgcccctaatacaatcgcaattaacacattagagggcaggctgcgaatcacgccttccgcttttcccttattaaaatagtcatcaagcatttgagtcagattttctatcatttttttgcttgtatgatttaagtaatgagcgtcttttttggtttcaagaaaaaaaagcgcatagtcgctctctttcgtaaactgaacgagacagcaaaatacgtggtgaaagccttctctgacaggcaattctgaaacgtcttgcttcagtttttccgtaaatcgctggatgctttcttgaaacagtacgttaacgagtgtttctttgctgtcaaaataacgatagatcgttcctgtccctacatgagcacgttcagctatcataggaatagtggtagcgtcaaaacccctttccgtaaaaagtgagactgacgctttcataatcatgtcgtatttactgctggatgcggatatcatgtaatctgacaacctccgattcgtttacggaatgaatattcattccttttgttcacaaagaatgtctgccctgtctgatatcacctctttgttctttcttctgttataagtttatatgaaaaaaactttttttaatataaagtatatgcaaaaaataaaaaattaagaaaatatacccaaatcctaatacgaggatcttggatatatttcccgagaaattttttatttaacagccacaatacatagacaggaagcacgcctgataacagaaagatccctgaaatgctggtctttcagcagttgaatatacgttttctctttttcaccggtatttgtgtcaatactgatataaaaccggccgtcaatttgaagcaccctgtaaatttctcttaatgcaagcctaatatcggtgcagctttgaaccgtatgtaaagaaaagactttattaaaggtacggtcatcaaagggaatgtcctctggatagccatgaaaaacctccccgttccccatgttctttcgattcgcacgtgatatctgtcttacctttcgttttgaaggatcaatgctttttaggctacccttttttagtttcttggttatgcttttaaagacagtgccgtttccaattccaatttctaaaattctgtcattttcttgtatatctatagagtcaatcatcatatgctcaattgttttggttagcttatatttccgagaaaataatttccaaaaatccgatcgtttatagagtctattttctagcattttaaacacctgcttttggtttcctatgtttatttattatcttaaaaaaataaacatcatcttcatttctaaaagtgaaggaaggtaccaactagacggcaatgtattgaaaaatgtttcaatagaactaaactttttcatttttttccgaaaaaaaagcagaaaacataatgttttctgccctctttctaatgccaatgataagggaatacatacagcctttgctgctgcattgccatcagcctctgctgtcggaatggatttccataaccatgtttgaaggaatgcggcatggacgcataaccatggccaatcgacggcagtcttttttgataatcgttcatcatgccatcacctgcctcacaataacgttgatttactatatgcaggcgcgcattttcttgacagctatttcgctaaacttggtccttctccattgtataatgcatcaatagttccattctaagcatatgccattcccccttcagtttttttcgttgcttttagcgccagtttgttaaataaagatgctttaactgagactctttcatttcatcataaatttgttcaatctgctgttctcgttcgaattcttccaggcttttaaaccgttttttaatcgttaacgttaaaaagaataggttaatcgtcatatcgctcaccccctttcaaagtccgcatcaagcgaaataacccgcggcacaacccttctgccgcgggcaaataaaaaccgcagacaaaagaagacaccaatgcctctactgcctgcggggagttgcgtatgtccgactattccgaatttaatgcgtgcgataagcatcggttaaggaaggacacgaactcttccacaggctgaataaaccatgaacttttacatgtgtatcacgtacaggttgacgtcgttgtctcattgtcattttggttcagcctcctttgcttttttcttactttgtaagtatatccaccaaattccattttgtaaacatctttttctaaaaatggacggaaattgtgcaaatcatcgaatggatttgcccgttggtcatgacacctgcttcatttcttttctggagcggtctttcttatgatatgcaataaaataaatgagaccgacaaatacagctccgccgatgacattaccgataaaagccggaatgatgtttccgatgaactgcccccacgtgaatgagcctgcaaaaatggcagcaggaatcacaaacatgttggcgacaacgtgctgaaatccgatagccacaaaagccatgattgggaaccagatgccaaggatttttcctgctgcgtcttgggcgccgaaagaaagccacactgcaagacatacaagccagttacagccgatggcggaaatgagaaccttgccaaagctcatatcaagctttccttgggcaacggcaatcgttttttctaaataaggacctgtttcagtcaatccaaccaaatgcccgaaaaagtaagcaacaaacaatgcgccgattaagttcataattgtgacgattccccagttaatcgctaactcttttactgatatttttctcgaaaataacgccatcgcaactgacatcatattgcctgtgatcagttcagcgccagcgagaacgacaaggatcaggccgactggaaatactgctgcaccaatcaaactggacaggctcccccattctttcggaagatcgccaattaccctgatatcaagcaaatacccaagcgcgataaatgcaccgcctaaaaaccccagcacaagcagtgacggcagcgggagctttatttttttcatccctgcttcaattgctgcttccgctatttcatccggttttcgaaaagccataataaaacgcctccattacttcttcttttctcacagttatgcaagaaaggcaataaaaaaggcagcactcaaataacctgtgtcaaaccaggcgtttgaatgctgcctaacttgtatgcatacccatacaacaatatcaagcagtatataagatattgaaagagaatatatacagttcgtgcatacattccattgctttagccttctataactgtagcaacatcatatcaaatgtgacaaatttgtgtcaatgacaaatatactagctttgcagagcttctttttgctcatctatttttcggtcaaaaacaaatacagatacagcgatgttttcctcaattttaatatcagaaaacaaatggactagcttagctcccataagttcctccattccttccggtgtttgtttggaataaaggtcttgaattaggcttgtccgggccgcatgtaccatctctcttccttcaggcgtgcgggcaataaactgctcgcttgcactcagatttccgtatagtgttgaaactgccatgttttctacaaatacagtatgaattctctcaggcccttttccgaacaattctttgcgaagttttcgaataatatcattgaattcatgaatttttttagacatgctgattaccccttccgatattgccttataaaggcttttcccggttcccctcaggacatttcacttggttaaaattttcctgccatattgtattataataaatatcacattataataaaagcagtgttgatggatttgtaataggatcttgttatgagtctatcgttttataaaaatcaaggattggtctgttagtaagacttgctagtgaactattccgccatgtgtgtttacaccttcttagaattaagggcaggtgtatctatacatggctttttttgacttcttgaaagaaagatggaggggaatatgaatatgatggacgttaagtcgatcagtgtccgtgtagacggaacagaaattcaagcacgagcaggggccacaattttagatattttaaatgaaaacggaattgagtacccgcagatttgccacgtaccagaggttgacccgattcaaacttgtgatacttgcatagtagaggcaaacggcaagctggttcgttcatgcgcgacggttgcagaaaacgggatgtctattgatctttcaggaaatcgagtgaaagaagcgcaaaccgaagcgatggaccgccttcttgaaaatcatttgctgtattgtacagtttgcgataacaacaatggaaactgtacgctgcataatacagcggaaatgatggggatcgagcatcaaaaatacccatacacgccaaaagaagatccttcttgcgcggttgatatgtctcatcctttttaccgctatgatccaaaccaatgtattgcctgcggccagtgtgttgaggtctgtcaaaaccttcaggtaaatgaaacactctcaatcgactgggaacgcgaacgccctcgcgtcatttgggatgagggagttccgatcaatgaatcttcctgtgtcagctgcggtcagtgtgtaacagtatgtccatgtaatgcactgatggaaaaatcaatgctcgggcaggctggttttatgacaggcattaaagaggacgtcatggaaccgatgattgatctcgtgaaaaatgttgaaccggggtatggcagcatttttgccatttctgaagtcgaagcggcaatgcgtgaaacgagaacgaaaaaaacgaaaactgtatgtacgttctgcggtgtcggatgttcatttgaagtatggacaaaaggacgggatattttaaagatccagcctgtttctgatgctccggttaacgcaatttccacatgtgtcaaagggaaattcggctgggattttgtcaattcaaaagagcggatcacaaagcctttaatccgtaaaaacggagcctttgtggaatcttcttgggaagaagccctcgatcttgtcgcaagcagattaggatcaattaaagagcagtacggtaaaggctctgtagggtttatttcttcttctaaaattacgaatgaagaaaactacgtcattcaaaaactagcgcgtcaggtatttgaaacaaacaacgtcgataactgctcacgctactgccagtctcctgctacagacggattgttccgcactgtcggcatgggcggtgacgccggcacgattaaagatattgccaaagcaggcctggtcatcattgtcggtgccaatccggcggaaggacacccagtgctcgcaacacgcgtcaaacgggcacacaagctccacggtcaaaaactgattgttgctgacctgcgtaaaaatgagatggctgagcgatctgatctgttcatcagccctaaacaaggcacagaccaagtttggctgatggctgttacgaaatatatgatcgaccaaggctggcacgatcaggcgtttattgatgagaacgtcaattactttgaagattataaagaaacccttaaaacgtatacgcttgattatgcagaacgcatcacaggcctttcaaaagaaaacatcattcaaattgctgaaatgattcgtgatgctgacggcacttgtgtcctttggggaatgggtgtcacacaaaatacaggcggttctgatacatcagcagccatttcaaacctgcttctcgctacgggcaactatcgccgtccaggtgccggcgcttatcctctgcgcggacacaataacgtgcaaggcgcatgtgatatgggaacattgcctggctggctgccgggatatcagcatattacagatgacaaagcacgcgctaaatttgaagaggcatatggtgtcgagattgatggaaagcctggtttagataatattcaaatgcttcatgccattgaagaaggaaaaatgaaagctatgtatcttgtcggtgaggatatggcactggtcgattcaaacgcgaaccatgtgcatgatattttatcaagccttgatttcttcgtggtacaggacatcttcctgtcaagaacagctcaatatgctgatgtcgtcttgccggccactccttcacttgaaaaagacggaacatttaccaacacagaacgccgtgtccagcgattgtatcaggcgcttccgacgcttggtgacgcaaaaccggactggtggattattcaagaggtggcaaaccgtttaggagcgaattggaattacagccatccaagtgacattttctctgaaatggcgagtctttctcctctgtttgccaaagcaagctatgaggtgcttgaaggctggaacagcttcctatggggcagcttcacaggtgaaagcacaccgcttctgtatgaagacggatttaatttccctgacaaaaaagcccgctttgccctttctgattggaccgagccagcggcatttccggaggaatatgaccttcatatcaataacggccggatgctggagcatttccacgaaggaaacatgacaaataaatcgaaaggcatccaagcgaaagtgccgaatgtattcgttgagatctcacctgagcttgcacaagagcgaggtgtttgtgacggttcgcttgtacggctcgtttctccgttcggagcagtcaaattgaacgcgctgatcacagaccgggtacggaaaaatgaactctatttgccaatgaactcgacagacaaggagtcagcgattaacttcttgacgggccctgcagctgataaacggacgaacacgcctgcttataaacagacaaaggtccgcatggaagtgcttggcggctgtgaaacagcgccgcttccaaaaacaaatccgcgcaacaaaaaacggcatccgcaaaacggagtcgaagcagaaagaaaatggaaccgccctggctatgtacatctgactgattaaacgataggaggaaaacgaatggccactccgattacgacgatcaaaaaagaaacaaaaacagctgagcaaattaagcttgaaaaaatagaagaactgaaagagctgctggcggaaaatgaggacgccgtctctaaaacgatgacgttaatgaatgaactcaatgatcttggaatttttgatgcggcaacaagcatgctcagagcgaaggaagacattgccaagattgcgcttggccaagtttcccgcgagcctgtcaccaacctcatcaacacgatgatggccgccggaggcgcattgacaaaagccgatcctgagtttacagcaaagcttttagaaagcgtaatggctgggactgaacaggcacaaagctttttaaaagaagacaagaaagtcgggattctcgacctgttaaaagcaatgaacgatcctgacatcaacagagccgtcgggttcggccttcagtttttaaaaggcatgggaaaagaacttcgagaacaataacagaaaaacagccatctctgatgatggctgtttttttattcgtcggcttcttccagacgcttcttgtaaataagtgaacggtcagcgcaaaagaaggcaccggctaaaaatacgcaatccgctaaaaacatcgtcgatttctggcctaatgttaagccttgatcagggagaactgcgcctatatataaaaaagtgctgactgcaagcaatgtaaaagcaaaatgcttgtagtcttcttttaaagatttcattctatttttgttcaaaagaatcacctgccagattcatagtatacgactattataatataatccggcggcttacagagaaagtaattctatccatttgttatatattttcaagcgcttggccgatatcttccaacaagtcttccgcatcttcaattcctacagaaattctgatcaagccgtccgtaatgccgagctcaagccggcgttctctcggaatagaggcatgtgtcattcttgcaggaacagaaattaagctttcaaccgcccccaggctttcagcaatggtaaacagtttcagatttcctaaaaacgcatcaacccgttcttcactgccaatatcaaaggagatcatgccgccgaagcccgctccttgcgtttttgcaagctcatgtccgggatgatttgaagaaccagggtaatataacgtttggacagcagggtgattctcaagaaagcttgcgattttccgcgcattttgatcgatcgcttccattctgagtcccaacgttttgattcctctcattaacagccaggaatcttgagggccgagcacgccgcctgtggagttttgcacaaaatgcagctcttctccaagctctttcgaagctgtcacaactaaacctccgacgacatcactgtgtccgccaagatattttgtcgcactgtgcagtacgatatcagcgcctaaagtaagcggctgttgaaaataaggagtattaaaggtattgtctacgataagcagaacacccgctttttttgcgatatcagccatgagcgtcaggtcggtgattttgagcaacgggtttgtcggtgtttcaatataaattgcttttgtattagggcgaatcgctttttcaacttcttccctgctgctcgtatcaacaaatgttgattcaatgccaagacggttaagcacctttgtcatcacgcgatatgttccgccgtacacatcatcagtcaacacgacatgatctccgctgttaaacagcatcataaccgctgtaatggcagccattcctgagctgaacgcatagcctgcttccccgctttccagttctgtcacaagtgcttcgagagcggttcgagtcggattggccgttcttgaatactcgtagcctgtatgctgccctgctttcggctgcttgtacgtgcttacttgataaatcggcacggaaactgcgcctgttttctcatcacctgtgattccgccatgtatcatcaatgtttttttcttcatatcagatgcctccttcgtatatttgtttgctgatatatcgatcgctgctgtcaggaaatactgtgacaatgttagttccagcggatgcttttttcgcttcctccaatgccgcataaagcgctgcacctgaagagcttccgatcagcaggccttctttttctgccgcttctttcacaagtctaaacgcattctcatctgttacggtgtagatctcgtcaaaatggctcttatccatataatcggggataaactccatgccgatgccctctgttttatgagcgtggggctctcctccgtttaaaatcgagcccaccggttcaacaatcaccgttttgactgctggatttttttcttttaagaaggaagctgtccctgcgaatgtgcctcctgatcctgcccctgcgacaaatgtatgaatattcccgtcaagcgcttcccacatttcaggtccaagcgtcttatagtaagtcgatggatttactcggtttttaaattgcaaaacgcaataagaattttcaatttcagtctccagctgaatggctttttgaatggctccctgcattccgtcttgacgcggtgtatgaatgattgatgcgccaagcgcttgcataatttgctgtttctctctgctgaaatgttcagggacacagaaaatcgctttcagcccatattttctggcacttaacgcaaggccgatccctgtattgcctgccgtagcttctataatcactccgccgggtttcactttgcctgaatcgagcgcgtcacgaatcagcatatctcccagtctgtctttgatgcttccccctggattcatcatttcaagcttggcatacaccgcgactccttctggaacatcaaagttcttcaagcggagaagcggtgtattcccaatcagctcggtaatgtccgtaatcactgtcatatatgtcctcctccttaatagaggttgtttttagagaaaaacggaggagaacgttctccccgttttaatgaattcgtttgatcacctttaacacaagctctgttgaatgaacagccgcctgctctaaaaattggtcaaatgaaacatgtgattctttgcctgcgatatctgataacgctctgatgacgacaaacggcgttttaaattgatggcatacttgagccactgccgcagcctccatttcaaccgcgtacagatcagaaaatctcgcacgcacctcttcaacccgcttcggatcgttcatgaaagaatcgcctgttgcaatcgttccttttgcaacctgaatgccgtcgagttcagataccgcttcttcagtgatgctgatcagcttttcatccgccgcataagcagccggaagacccggcacttggccgtattcatagtcaaaagccgttacgtctacatcatggtggcgaacgtcagtggaaatgacgacatcccctacattcaatgtatgatgaaatccgccggctgagcctgtgttaatgacataatcaggcttgtaacggtcaagcagaagcgtcgtgctgatagcagcatttacttttccaattcctgattttaaaagaatcacttcagttccttcatattcgcctgttgtaaattcacagtgtgcgatcgtttctgtttttgcattttcaagtttgtttcttaagatggtaacttcctcttccattgctccgatgactgctagtctcatctattcacattcccttcactttaccgtttgatcgcctccattatccacacgaagtcgttttgctgagtgaatcggactgcaaaaccttcagctgtaaacatttctttcaacgcatccaatgtaggataatgctctgtctctaaatcatttgcaagctgataaaagccttgagaacgggctttatcgatagcctgttgatacgcttgcgcattttcaaagacggtatcggcaaacactattttatcatgcaagtgaaggtatttgccatattgctttatggcagcccgcttttcttcgtcagtcaaatgatgaaaagcatatgaactgacaatcgtatcagcctgaaatggcggctcagggaatgtcaggaagtctccatcaacgatttccgtcctgcctgagagcttgtcagaagccagtttacgcattgctggagaaggttcgattccaaatacagttttgcctgcatcgagcagcttagctgtcaaattcccggtccccgggccaaattctaacacatgcgttccagattttctgacgatggcatcaaggatatgatcgtagcctctgaacgcttctttatactgaatatctaaaccttgtactgtttgatcataagttgctgcccaatcttcaaagagagggataaattcacggcccatatttgtcacactccatatttaataattcctataagtatactatggattaatgatggaacagttcctataataccacatattctgaaaagcaggtactaaaacactttgtgtattttatgccatctcatattgcgcattgaccgcaaaaaagcttatacttcatatgacttgtgaaagctggagggtcaagacatgaattttcaattagatctgattaaagacaaagtggaattttttgaagcggcttcattgcaggagcttgaaaagaaaatcaatacacaaattgaaaacaataaagccatcatgctccgggtgaaatctgtttcacaccaaactcttgtggcagaaggaagaatattgtacagcgcggtggttcatttctcagctgaagcctaaaacaaaagcagccggttttaacccggctgcttttgtttattttagcttttctacttttgtcggcttccagcctttttcatcgacccatgtaatcgtgacttgatatttattcccagtcgccttgtccaaaatcttgcctttggcatcctgagggctgccgttatttccaagccagagcaccgtcatgttatctgttgagacaccagttgcgtacgaaatggctttcagcatctcagcccagtcttgtgagcttgaatcataagtagcggcatgctcgccagtctgctcagttccgactgctttccagtcaggattttcatacgttttttccacatcgctcgatgagccgccttctgttacttttgcatctttaagcccgtcaccggctgaatctgagcttgaatctgaatcagagtcatcttttttagaagaagaatcatcttttttggaatcagagtcagaagacttctcagaatccttttcgctgtcagatgtatctttcttgctgtcttttatatcctcatccgatttcttttccgtctttcctgaagccggagattcctgtttttgcgccgtttcagaatccttgctgacatctttgctagaaggactgttaatgaagagattcgctgctactacgacaattagtatggatacgattgcgattaaaatgttaagcactaaattggcttttctgcgtttatcacgattttcataacgagattgattattgctcaataattctgcactcctttatccctcttggctcagcatatattttaacatgtgctgagaagttgttctatttctgattgatttcaatttcgtgtacttttttaacaatatcataaaacaccgaatttgtcagagccttatctcccggtgtatccatgtgtaaaacaactagagcgtatttcggcttatccgcgggaaaatatccggcaaaccatttttcgtagagcgtttccttctcttttgaaagcttgcctgtctgggctgtgcccgacttccctgctacagtatacggaagatcttgaaaccttctgcccgttccggaaggagattctactacccgccgcagtattttttgaagctgctgtgacgtatatttgtctatcgtttcccctttgagcttctgatctttaaacgtaacgagcgttgtgccgttcttatactcaatttgttcggcaattttcacctgccgtttttctccgccgcgggcgattgtcgccatcatattggctacctccagcggcgttacctttacatttttctgcccgattgctgtttgcgcaatggcttttttgactgatttgtctttttcatccccccaaatcacgccgcttttttcgttatacagctggcggaaatcggtttcgtggtacagttttccctcccagcctgcccgatcagtgagagccagcttctcggacatatcttcaataaccgagctgtcttttttcattaattgttctgcaagactcgtaaatgtgtaattacagctttgggcaaaactttcatcaaaagacaaggtgcctttgtcgtcccccggttccccgtacaggtttaaattgcaattaaaggtttgactaggcttcaccatattattttcgattgcagctgcggcaatgactgttttaaaaactgatccgggatagattggcgtcagcatataattttgaagtgtgttttgccgggacacgtctgcatctggtttgcttacaattcccagaacactgctattttcgatgtccagcagcacagctcctccctttttcagcccctgttcatccaatacctcctccatcgctttttgaatgctttgatcgatcgttgttttgatctggagcggataaaatgtattggcttcagctgtatatttgacgtccatgccaaacaaagggtttccttttccgtccacatgatataaaagctttgtgtcttgttccggaagcaaaaactcgtcaaatgtccgttctaaaccggttgttccgatttctgttgtaatcggaaggctctccttgtcaggatatttcttgcgaagcagcgccggatcttggttcgtgctccctatcgtatgtgaagcaaggctgggcttgtcttcattctccatatatacgccgtaaatgccgggatatttcaaagaattgatttttgtgatagattgttttgaaagtgttttgattttcttttgctgcaaaatgaccggtttttttgcctgacctagtgtctggcgcaaatcatcttcagacatgccgaggatgtccgcaacttttttgatcggccaatcctgcgtcagcagaaaagggaacaaaacaaccgcaggctcgctttgtcctgtcagcgcccgcccgtttcgatctaaaaaagagcctcttccatctgaaatgagcacttcctccgtccgctgtttcacactttcttgaatcaaattaattttctttttagaaaatgattctgtgaaaaacagctggatttctgcaagtctcagcagaagcagaaaaaatacaatcaaaaaagcgatgactgccagcttcattcgtttcgatatcttcataaaaaaacacctcacccacattgtggacgaggtgtttcgctgctaaacagatattatgaaattttcacaattttcacgagcatttctccgcccggtgtttgtactgtgacttcttcatctacttttttgcccaagaggctttttgcgatcggtgaatcgtttgagattttcccttcaaacgggtcagcttccgcgcttccgacgatcgtatatgattcttcatcaccgtcaggcagttcgacgaaagtgacggttttacccaaaccgacaacgttagagccgccgtcatcttcaatgattttcgcattgcgaatcatattttcaagagtcgtcacgcggccctctacaaatgcctgctcttctttcgctgaatcgtattcagagttctcggaaaggtctccgaagcttctcgcaattttgattcgctctactacttcttttcgtttaaccgttttcaaatattctaattcttgttcaagtttttgttttccttctgcagtcataggaaaaactttctcttgtgccatgtcccttcactccttctggttgtccctcaacatcttcgattatgtatgagagcataaactaaaaaatacaagaatgagaacacagggcagtcctcgttcttctctcccatataggtactgtttatcttaaactgaatcgtgtcgttctgcaaatatttcgcgtttataaacagggaaagaagggaattcgcacattcccttcctgcctatacataatatggtcagagttatttatgtctatgctatggtattacaaaatcgcgttttgttcaagaatggtttgaatttttgtgaccatcagatcaattgcgacgtgattctgaccgccttccgggataataatatcagcgtatcgtttcgtcggctcgacgaattggttatgcatcggacggaccactgacacatattgttcaatgacagaatcaatagagcgtccgcgctcattaatatctctcataatccgtctgatgatacgcaagtcagcgtccgtatcaacataaagcttgatatccatcagatcacgaagccttttgtcttcaagaacaagaatgccttcaaggataataacatcctttggctctacgtgaaccgtttcttctgaacgtgtgtgaagcttatagtcataaatcggcttttcaatcgggcggtaattcaatagatcttgaatatgctcgattaaatagtcattatcaaacgcaagcggatgatcatagtttgtgttcagcctttcttcaaacggaagatggctttggtctttataataaaggtcctgctggatcattaaaattgagtgtcctttaaactgttcataaatggaccgtgtgacactcgtttttcctgaaccggaacctcctgcgattccaatgactactggattcttacccatgggctgttacttcccctttctcatcatgttgctcggataaatctttttgtctagtttgaatttgacaatttgcaggggatggcgggcagcatctagctcatttccgtcttcgtcccaaatggtttcaatcgtatgtgtaaagttttcgatttctggaccgaaaaattccacttcgtcgccttttttgaagaaattgcgctgctgaagcgtgaccatttgtgtatcttcatcataattcagcactaagccgacaaaatcatatgtcgttttcttggcgtgttcgccgaacatttgctcttcatagcctggcgttccttcaaagaaagctgtcgcagtgtccctgttggcgcacttatcaagctcttcaagccattctttttgaatcacaaagttttctggatcagcgcaataagcatcgattactttgcggtatacgctgacaacagttgctacatagtgaatggatttcatgcggccttcaatctttaagctgtcgatccccatttcaatcatttttggaatggattcaatcagcttcaaatctttcgggctcatcgcaaatggtgcatcttcttcaccatacaaagcaacggcgttggcaccgtctgtttggtagagatcataatcccagcggcatgactggcagcagcctccgcggttggaatcccgcgctgtcatgtgattgctcagcacgcagcggccggaatatgcaatacacattgcgccatgaatgaaggattcgatttcgatatctaccttttctttcatttctctgatttcaagagcgctagtttcacgtgccagcacgacgcggtcgagaccttcttccttccagaactggacagccttccagtttgaaagagactgctgtgtgctcaagtgaacctcaacattcggcgccactctgcggcatgtttcaataataagcggatctgccacaataataccggcaacgttggcgtctccaagcgcttttaaatagtcttcaagcccgtccatgttttcattatgagcgaaaatattcgttgttacgtagatcttcgcgccatatttctttgcgaattcaacgccttctgcaatttcttcgatcgtaaagttatcggcattcgagcgaagcccgtattcctgtcccccgataaagaccgcgtccgctccgtaatgaacagcgattttcagcttttcaagattacccgcaggtgcgagaagctccggctttttcgtaatcacacgctttccattaacgattgtggatattttatcatttacggcagtcatagcttaacctccttttgattaataaaccgtttccttgaagaagaatccggtatcaatttttctgtttactggctggatgctttcaatgcgttcgatccagtcttcttttttcgcttcgtattcgtcacggttttccacgcacaaatcaattgcttctctgtacattttggtgacttctattaggtattcaggcattttcaaaacaccatcgattttgaaagaatcaattccggcatctatcaattcctcgagctcatcaatgatgcacacatcgttcgggctcatgatgtgagtgccgttttcatcttcgaaaatcggatatttattatcgcgttctttatcgtgtaaaaacatgcctgattcttttttctttctttcaatgtccatgactttgccctgatattcaaaatagtttccaatcaaagaacgcttcgattggaacatgcacgtcattccatgcacctggatttcaatttcgacttcagcattttctttaatctcaacaatgctgtccatgtttaattctctggcaagcacagaacgcgccgcacccttgcgtccccagtagttgcatgtataatagttggtgcctgtcgtttctgtgctccaatgaagcttcagatcaggcgcagattcacgggcagccatcagcacggcaggatcgccgaataccgctgcatcgacaccggcttctgctaagaaagccagatattcgccaagctcacccactttatcattatggaaaattgcatttacagcaacgtatacttttgccccttctttgtgagcaatctctacggcttttgttacatcttcacgagaaaattctccggctaatctcaagccgtatctctgttccccaactaaaaacgcagttgccccagcctgtatgagcggcaaaatgtccgctgtactcgtcggcgtcactaagagctctggttttttcatgacgttcacctcttctttttactaatcgcaagtccgtccccgacaggaataatcgcagtttgataatccggatgattcatcagccaatgattatattcatcaattttggctacaagcctgcgccttctcttcggttctattttgctgtaatcctctgccaccagacctttaaacagcacgttgtctgttataatcaccccgtccggtgaaagcatcggttcatataaatgaaaaaagttttgatactgaccttttgcagcgtcaataaaaatgacatcgtaaggcgcggttacatgaacggcgtcggctaattcaagcgcatctccgtaaaaaacatgaatccggtcatcaagctgaaattccttgatattgtttaccgcttcttcatgccgtttctcattgcgttcaattgtatatatttcagcagacggcagttccagagccattcgaatggctgaataaccaatggccgttccgatttctagtatttttttcggctgtttcacagacaaaatttgaagcagcacctccatgcccgctttttccataatcgggacatgatgttcttctgcatatgcttcaagtctcttcacgttatccggccgaggctttaataatgcttctatatagtcatttatttgttcataccggtcagtcactacaaacagcctcccgttctaaaaaggagtgccccagtcttatgcgcaggacactctctgaatacatcatgatacatcggtaaacaacccgatatattttatcataaaaccttgcggaaagcgaacaaaaggagagctttttgctctccttttatttctcattttttgaggaaatgtatttttcttttgctttattatgctcttttagcgtttttgtaaatacgacctcaccatttgatttggccaagaaatacagatagtccgttttatccggatgcagcgctgcttcccatgatgacatgccggcattggcaatcggccctggcgtcagccctgtgtttttatacgtattgtatggtgaatcgatttccagatccttataaagaacccgatctttatgcttgcctgccgcgtacaggacggtcggatctgtttggagcggcattttctttttcaggcggttataaaagacgctcgcaattttatggcggtcggctttttcagtcgcttcttcttctatcaaagaagccattgtcagcagcttatgcacagaaactttgtttttcttcatttctgatttatatgtttccacataagaatttgtctgcttaatcattgccttgataatgtcttcaagtgatgtgtccggatcgttaaaagggtatgtagccgggaataggtacccttcaagcgggtgcttaatgtttttattgaaaacatcatttgtcacagtgtccgggaattctttcttcagctgattgataaatgtttcatcgtccagcttcgctatgacttgttttttagagtattttgtttcatcagcaatagcagccgcgatttgggtcagctgtgctccctcagtcactgtgatttgaaaagcgtaacctgtagccccgcttgtcagcttctgaataatggcatctaaatccatacctttattcagatggtagaatccggcctgaaacccggaagcacctttatatttcacatagtactgaaacgccttctcgctttttatgacatcatttttctttaatatcgatgcgatggctgaaacagacgaaccgctcggaatgttaatattaactgtcgttttactgtctttttcaacaggttcaagcaatgatttcccatataaaaatgccccgccaatgatgagaaacagcacaacaatggaagacagtatgattctttttttattaaaaaacgattttttttgctgattgatatacattaggtctcctcccatcagctcttatactacatgattcattgtatttcggcaatttattacaaaaagaggcctgcataaagcagaaaaaagccggagcagtatagctccggctttggtttggcgcgatgttttactcttcgtcttcgtccgctaagaatgtgtttagtgtttcttcgatcatatcccattcttcgtcagtttcaatcgggaatagctcaccgttttcaccgtcttcgtttggcgtgaagctggaagcaagaatttctacttcttcgtcatcttttgattcgattggatagtacaagacataagatttgccaaactcttcattttcaaatgtaaacagcacttcacaaagctgttcatttccttgatcgtcaacaattgtaatatttttttcgccgtgttccattttcttcacctctggctttaatttaagctgtcaagatatccttgtaaaatcataacagccgccattttatcaatgactttttttcgtttttgcctgctgacgtcagctgcaatcagcattttttcagccgccattgtggtaagacgctcgtcccacagcacaacaggaacattgtacgttgtttcaagcactttcgcaaatgtttggctggcttcgcctctcgggccgactgttccgttcatgttcttaggaaagccgagcacgattttatctatagtatagtcctttatcagttcagataaacgggataaaccataatcgccttctgcttcatttatctttatggtctcaatgccttgagcagtccagcccatttcatcgctcagagctacaccgagtgttttggttcctaaatcgagtcctaatattctcattctttatttacgcctctttatgctgttctaaataagactttaccaattcctcgattaattcgtctctttcaagtttgcgaattaaattgcgagcgtcacgatgcctaggaatataagcgggatcacctgacagcaagtatccgacaatctggttgattggattgtagcccttttcctgaagcgcgtcatacactgtaatcagcacctcatttacgttagtctcagcagaatcatcggagaaattaaatttcatcgttttatcaaacgagctcaccgttttgcacctctttcccaaattcgcaggcaaagttcagcctggggtcctaatcttaccatcattctacactacatgggcgaattataaaacggatttcacccaatcttctacagaagccaaagcttcttctaatttttccggctgtttaccgcctgcctgcgccatgtccggacggcctccgccgcctccgccgcaaacttccgcagcttgtttaaccagcttgccggcgtgaagtcctttctcaatgaggtcctttgtgactccggcagagatattaactttatcgttttgtaccgcaccaagcacgatcaccgcagagccaagctttgctttgagttcatcgaccatagtgcggagatgattcatgtcttttgcatttacttttgccgcaagcacgtttacgccgtcaacttcttttactttcgacaggattgctcctgcttccacgttgcctagttttgcaagaagagattcattttctctttgtgcatccttcagttcagcctgcagagccgcgacccgtttcggcacttctttgatatttgttttcagctcgtcagcggtctgcttcaatacagaaatctggctgttcatttcgacgtaagcgccttgtcccgttacagcttcaatccgtcttgtgcctgctccgattccggattcagaaacgattttaaacaagccgatttctgctgtatttctgacgtggcagccgccgcacagctctaagctgtaatctccaacttgaacgacacggacaatatcgccatatttttcgccgaacagtgccatcgcacccatttcttttgcttcagcgatcggtttcaaatcaatgctgaccgggatgctcgcccagatcttttcgtttacgattctttcaatttgttcgagctcttcttttgtcacttggccaaagtgcgagaagtcaaaacgaaggcggttttccgttacaagagagcccgcctgattgacatgagttccaagaacatcttttagagcctgatgcaataaatgcgttgccgtgtggtttttaatgacgccgcttctcatatggtcttcaacttcagccgtaacatgcaggcctttttgaacagtaccgctctccacaacaccttcatgcacatgctggccgttcggcgctttttgaacatctttaattcttacaactgcctgctcgcttcggagatagcctttgtcgccgatttggccgccgctttctgcatagaacggtgtttcatcaagaatgatttgaacgctttctccttcatgagcctcttcgattaattggccgtcctgaagaagcacaatgatattggcatcagctttggtttgagagtagccgacaaatgtgctttcaactgtcacgtcgcgcagtgcgccgccctgcacctgcatgctgccgacatcctggcgggcgtttcttgcccgttcacgctgctggttcatttcctcctcaaagccctcatggtcaaccgtcatgttctcgtcttctgcgtattcttcagtcaattcaaccgggaatccatacgtatcatacagtttaaacacatcagcacctgagataacgctgctgcccttgtctttttcttttttgatcatttctgacaggatcgcaagcccttcattaagggtctcatggaagcgttcttcctcggttttaatgacttttgcgatgaaatccgctttctctttcacttcaggatagaaatcagccatgatttctgcgacaaccggcactaaatcaaacatgaacggacgatggatgttgatcgttttggcataacgcacggcacggcgtaataagcgtcttaatacatagccgcggccttcatttgacggcagcgcaccgtcactgacagcaaaggcaaccgttctgatatggtcagcaatcactttaaacgcagtgtctttcacattgtctttgccatatgtttcaccagaaatcgattctgttgctttaatgatcggaacaaacaaatcggtgtcaaagtttgtcggaacattctggatgacagacaccattctttcaagacccatgcctgtatcaatatttttctttggaagcggtgtgtacgtgccgtcagggttatggttgaactctgagaacacaaggttccatacttccaggtaacggtcgttttccccgcctgggtaaagctccggatcttctggatcattaccgtatgcttcaccgcggtcgtaaaagatttccgtattcggtccgctcggcccttcaccgatatcccagaagttcccttccagacggataattctttcttcaggaataccgatttttttcgcccaaaactcatatgcctcttcatcttcaggatgaaccgtaacagagagaagctctttgtcgaagccaatccacttgtcgctcgttaaaaactcccaagcccatgtaatggcttcttctttgaaataatcgccgatggaaaagtttccgagcatttcaaagaaagtgtgatggcgcgcagttttacctacattttctatatcgtttgttctgatcgctttttgagcgtttacgattcttggattttccggcacgacacggccgtcaaaatattttttcagcgtcgcaacaccgctgttgatccaaagcagtgaaggatcctcatgaggcactaatgacgcgcttggctctaccgcatgtcctttttctttaaagaaatccaaaaacatttgacgcacttccgcagaagttaagtgtttcattgtatttcctcctctataaaaatcgaaattctcttcagtgacagcaaaaaagccctccccctatgcaaaccaacgtttacacagggacgagagctgtctcgcggtaccaccctgattacgggcattcatgcgcccgtcacctttaaccctgtaacgcaggataagcggcagtgattaactgcactcaggattagcttcctccgatcttctgataaagctcctttcagcttatggagcttctctctttaacagggcttcggcgtactcagatccgtcactcgagattcgtatgtattctacgagaaattatagacaagcggcacgccgatgtcaatgctccgtcctcatccgcaaaaaatggatcatcattacttttaaaacagccgtcgcaggaacagccagaatcatcccgacgatacccgcaagctcccctccggcaaggagtgcaagcatgataacgaccggatgcattttaaggcttctgccgacaatgaacggactgaggatatttccttccataaactgcagaataaacaccgtaatcaccacaacaagaaccgccttgactgagatcgtcatcgcaattaacaacgcaggaacagctccgatgaaagggccaaaatacgggatgacattcgttaccccagagataaggccaagtatcagcggatacggaagcccaaatacccagaacgaaatgcctgcaatcacgccaagaatcaagcagaccaaaagctggccgcggatataatcgccaagcgaatcatccacatcccgcaaaaaggcgctgccccgctttctccacgacttcggagtcaagtaccatactgtctttttcattaactcaatgtccttcaccatataaaacacgagaaaagggattgttgcagcaattaagaagtaatcaagcacattgcggatcccgctgatcgcaccctcgatcgttcccgcaaaaaacgcctccgtctggcggatcattttatctatacggtgatgcataccatcaggccagtcatccgtatggttatgcacatgaagaagaagcccgttatacgtttcggcaaacatgggtatattttctgacaaatccgtcagctgcacgattaaaacaggcacccctttatacaacgcccagccaatcccgccaaaaaaaagaacataaatgaccaagatgctcaaagtcctaggcaatcctttgccatgcagccattctgtgaccggaagcaataaataagatataaaaatagaaatgatcaagggaataaagatcgtttttatgacgagccaaaagggtgaccataacatatcaagcataaaaaagacatagactgttaacagaaccagcaaacaaatagccacccacaacaaaagctgcaccggtttttggagcatctgctttcacctcacctatatcttttgaggtttacaaggaattattctttatgtttctttagtcagtcagaagtcatggacattttttcacttttaattttcagaaaagtttgatcatttactttttggtcaaattttctgataggaggattgcgatgatcacatttcaaaatgtaaacaagcattacggagattttcacgtgttaaaacaaattaatcttcaaatcgaaaaaggtgaagtcgttgttatcatcggcccatccggttccggtaaaagcacattgctcagatgcatcaacagacttgagtcgatcaatgagggagtgcttacagtaaacggcaccgccattaacgacagaaaaactgatatcaatcaagtgcggcaaaatatcgggatggtgtttcagcactttcatttatatccgcataaaacagtgctgcagaacatcatgctggctccggtaaaagtgcttagacaatcacctgaacaagcaaaggaaacggcgcggtactatcttgaaaaagtcggcatcccagacaaggctgacgcctatccttcccagctttccggcgggcagcagcagcgtgttgccatcgcaagaggactggcgatgaagccggaggtcatgctgtttgacgagccgacatcagcacttgatcctgaaatgatcggtgaggtgctagatgtcatgaaaacactcgccaaagaaggcatgacaatggttgtcgtgacacacgaaatggggtttgccaaagaagttgccgaccggattgtcttcattgacgaaggaaaaattttagaagaagcagtgccggctgaattttacgcgaacccgaaggaagaacgggcccgcttattcttaagccgtattttaaatcattaaaacagaaatgggggagcttgtatgaaaaagattttttctttagcattgatttctttattcgctgtcatcttgcttgccgcttgcggcagcaagggatcaaacggagaagcctcaaaggagagcaaaaaagatacgctagccgccattaaagacaatgacaaaattgtcttcggcgtaaaaacggacactcgactgttcggtcttaaaaatccaagctcaggtgagattgagggttttgatattgatattgctaaacaaatcgctaaagacattttaggtgatgagaaaaaagctcaatttaaagaggtcacctcaaaaacaaggattcctatgctgcaaaacggggatatcgacgccattgtcgccacaatgacgatcactgaagaacgaaaaaaggaagttgacttttctgatgtctatttcgaggccgggcaatcgcttctcgtgaaaaaaggcagcaaaatcaagagtgtcgagaatcttggcaaaggctcaaaagttcttgcagtaaaaggctccacctcctctcaaaacattcgtgaaaaggcgcctgaagcatctgttttagaatttgaaaactacgcagaagcctttacagcccttaaatcggggcaaggcgatgccctcaccacagataatgcaattttatatggaatggctgatgaaaataaaaattatcaattaacaggaaagccttttacagatgagccttacgggatcgccgtgaaaaaagggcaatctgctctcgcgaaagaaatcaacgcttcacttaaaaagatgaagtcggatggcagatacgatgaaatttataaaaaatggatcaaagaagacccagctgaataacaaccatcccgggatgagcaggcgatgctcatcccaatttgataaggagtgaataggcagatgaatgtgtcaattcttttcgataacttcagcatgtatatggacggtttttaccataccttgctcgcaagtgttatcgcgctggccggcagttttgtcctcggcgttgctgtagcggttatgagaataacagtctttaagccgctgcaatggctcgggaccgcatatgtagaattcatccgcaacatccctcttcttttaattacctttgttttctatttcggacttccaaacgcaggcctgaggcttgacggttttcaagcgggaacggttgctctcaccatttatacctctgcgtttatcgctgaagccatcagagcaggcatccagtctgtttcaaaagggcagatggaagcggcacgctcgtcaggctttacctacagccaagccatgctccatatcattttgccgcaggcaatcaaaatcgtcattccgcctttaggcaatcaatttttaaacttagtcaaaaactcttcgattcttggggttgtggccggattggatcttatgtaccaagccgatttagtttcgtcgagcacactcgttgtatttgatgtttatatttttgtggcgcttttttacttagtgctgacgattccgcttagcatcggtgttaactatctggaaaaacggctggaaaaaagctattgataaggagtgagttacattggatttcatcggtgcttattcacaggagcatttagcgtttttatgggatggctttctcgtcaccttgtacgttgctttcatctccatcattctgagctttttcttcggtttaatcgcaggcaccctgcgttatgcgaaagttcccgttctttctcaattgattgcagttctcgttgaaacgatcagaaacctccccttgctgttaattattttctttacgttttttgcccttccggaaattgggattaagcttgaaattacagctgctgcaattacagcactaacgatttttgaatccgctatgctatctgaaattatccgaagcggactgaaatcaattgacaaaggacaaattgaagcggcgcgctcctccgggctgagctatacacagaccctgttctttatcgttatgccgcaagcgcttcgccgcatggttccgcccatcgtaagccagtttatttctttattaaaagatacatcgctcgctgttgtgatcgccctgcctgaactgattcacaacgcgcaaattattaacggccaaagcgctgacggcagttattttttcccgatctttttacttgcggcccttatgtatttcgcagtcaactacagcctttcactcgcagcaagacgcctcgaggtccggcaaacatagaaaaggatactctttggagagtatcctttttgcattaaaacattttcgtaattcttcttctcatccgcttcatgcttcgattattcagcatgtcagattgagtcgccattcggtacacgagagctccggctcccattgccaaaagagaagtcatcgtccgattcatcctgcgcatctcctttcatgattaaaaattgatgctgcgttcatcctcagaaaacaaatcatccaagctgcttaacgttccgtcttcttccacctgatgagttgcaatcttccctttcgccactgtcagttcaataaaacagccccagcaataatattggttcacgccgattttgccgatatccttacttttgcaattcgggcatataagcatacctcacacctctatccgttcagaacgatctcgtctttccgcacctcgacaagcgaatccgctctttggatctggcgcttgcttcccgccaggtcagaaaagaaaccgtccgagagttcatatgctacgattatgcccctgtccaaacaaaagtatacatcttccagcatccccaatatatccccctcttgcgatttcacaagcttcatcttcatctgctcgtatgtgaagcatgatttcggaagaggcaaaagctgttctgaactgaccgaagccaatatgcggtcatcaaaaatggaagagatatcacacgcccgtaatagcgcatgatgatgatgcaaaaagcgtttttgtgcaagaataaacccaagacaatctcctttcagagaaaaacaaatatcggaaattgtcccgagataactagaagttcgttctgagtatactgggaatccttctacttcatggcatgttctcaaagtgtgatcaaccaccttttgttgaacaggcttaggttttgctttgcgccttagactcatacgatgaaatcaattccactgcaaatgaaaaaaaactcccgcttgcacgggagcattttattgctgttcttctttcataaaatcgaatggtgtaatgccttccatgccaatgttggcgtcgtgtacgctgaacgggagctctttttgcaaagcttcaagctcggcatccatttcctcaacctgtacggacagcctgtttttcaaggaggtctgtctgacagttgcatcattatttttcacgccccactccagcgcctcctcttccccgcataaaatgagaaatttcttcgctcttgtaatcgcggtataaagaaggtttcttctgagcattctataatagcctttcacaacaggcaaaaccacaatcggaaattcacttccctgcgatttatgaatagaacagcaatacgcatgggtaaattgattaaaatcttttttcgtaaatgtcatttcattgccgtcaaaagaaacgacggccatgtcttctttttctgtattttcctttgcataaaatatcgacgtgatttcgccaatatctccgttgaacacattgttttccggctgattgacaagctgcaaaattttatctccggttctgtagacaacatccccgaacttcaattctctccgtttttctttaggaggatttaaaatgtcctgcagcatcacattcaattcattaatgccggcttttcctctgtacatcggagcgaggacctgaatgtcctttgctgtatagccttttttcaatgcattggcgacaaccttctcaactacttctttgatttgcgacccgccgcagcgaataaaggaacggtcctttgtcggggcagtcaaattgttcggcagcaatccatttttcatctggtgggcaagctcgacgattgatgacccttctgcctggcgatagatgtctgtcagtctcacagtcggaatcacctgggatgccagcaggtctctgagcacttgtcccggaccgacggaaggcagctggtcttcgtctccgacaatgatgatttgtatatgatcagggatcgccttgaacaaatgattcgccagccatatatcaagcatactggcttcatcgataattaacagcttcccttcgatcggctgatcctctgtatgagtaaagccttcagcgccgttccagccaagcagcctgtgtatcgtaactgcagggagtcccgttgattcactcatccgttttgctgctctccctgtcggagcggccaaaacaatcggaaaagcttcatcctttttataagctgacgggtctagtgacacaccgtgaagctctccgtagagctcgacaatccctctgattaccgtcgtttttcctgttcccgggccgcctgttaaaagaagcatcggcgaggaaagggctttttgaatcgcttccttctggctgggggcatactgaacgtccatccgttcttccagttctcccaacgcgagcaaaaactctgattcgggaaactggttctcatattcggtttggctagcgatatgtttcacacgctttgcaacgttttgttctgcgtaaaacagcgaaggaaaataacagcggccatcttctatgacaatgtctttattttctccaagggcaataattgcgttagcggcatccatttctgtaatgcgctgcccttcccttgctgactggtttaacagtgattgagtgtcgatgatcagctgttccgtttctatgtacgtgtgcccctctgacagacaagtcgtttcaagcgtgtacaaaatagcagcttttacccgctcaggatgattacccgaaagacccattctgctgcccagctcatccgcttttccaaacccgatgccttctacatccttcacaagctgataaggattttcctgaatcttttcaagcgtctcggattcataggcttgatagattttcatagacagctgcgggccaaagccaaactgattcaaggaaatcatgatttgctccagtccctgatgccgctgcaatgcgccagccagcgtgtctgctttcttttttgagagtctgggaacatcataaagcactgaagcatcagccaatattttattaatggcgctgtcgcccagctttttcacaatttcttcagctgtttttttgccgatcccctcgaataaatcactcgataaatattgaatgatgccttccttagtcgttggaatctcctttttgaaatgctccgcctgaaattggagcccgaattttggatgggttacgatctttccgtaaaacgtgtaggtctcttcttcttgaagcgcagggaagtagcccgtcacggatacggctttatcttcaatggcttcggaggtctctgtgactttcactttcagaaccgtatataaattggtgtcattatgatagatgactgtgttgactgtcccttttaaatagggctcttcctccagtttaagctgatccggatgctgctgcacgagctgtccctcctcctgtgcctgttatgatggatcaatcagttttttagcatgaagcgcaagcatatgatctggctggatatcgattgccttgtccagcatttccagcgctttttctcggttttctttataagcataagtgacaccggcattataaaatgcatctgcatgccccgggtcttgctctgtcacagctgcgaattggctgagcgcttcgtccagcatgccctcgttggctaagcacatcccgaattgaaaacgcgcttccgtatcgttttcattcagttcgactgctctttgtaaatatggcagtgcaagcttaggctgttcgagcttgacaagtaccgttccgagcatgtaaaacaggtcgccgttttccatccccgcacgtagcgctttttcaaacatgtctttcgcttctttgtacatttcttttacaacatagacatttcctgctccataataagcagtggctgcgctactgtctaattcaagcgctttatcataaaacgcaagcgcacgttccagctcgtttacggatgaaagaaggttggcaaaattgatatacggaatcgcgtcttctttattttcttcaatcgcttttgtaaatgcctctgccgctttctcgtaatcgccttcctgcatcgcctctataccgagttgattataatccaccgatcatcttcctttcattaaaaaaccccaactcagtgttgaggtttttcatcttttatacgtaccacaattttgttccgtctttgtacacatcatcaattgtcccgccgccaaggcattcttcgccgtcatagaagacaacggcttgtcccggcgttacagcgcggacttgttcatcaaagatgacttccgcttcaccttcgccagtcatgcgcactgttactttatgatcctcttggcggtaacggaatttagccgtgcaggaaatctcttcgcccttcatgatatccgaacgtacccagctgatatttgttgctgtgattttgtcggaatataaaagcgggttatggaacccttgatctacgtagaggatgttcttttcaagatctttgcctaccgcaaaccacggctcgccgcttccgccgatgccaaggccgtgacgctgtccgatcgtatagtacatcaacccgtcgtggcggccttttacttcgccgtccatcgtcatcatatcgcccggctgtgcagggagatattggctgagaaacgttttgaagttgcgttcgccgataaagcagatgcctgtactgtcttttttcgtcgctgttgcaagttctgcttctttggcaatttcacgcacacggcttttttgaagttcgccgatcgggaacatgactttgctcagcgtatcttctgtcagctgattcaggaagtacgtttgatccttgttttcatcaatgccgcgcagcattctgacttttccgccgcttctgtctactcttgcatagtggccagtcgctaaatagtcggcgccaagtgacaatgcatgctccaaaaaggccttgaatttaatttctttgttgcacaatacatccgggtttggtgttctgcctgctttatattcatcaaggaagtattgaaataccttctcataatattgcttttcaaagtttacggcataatacggaattccgatttggttgcagacgcggatcacatcttcataatcctctgtcgccgtgcaaaaaccgttttcgtccgtatcatcccagtttttcataaagattccgattacatcatagccctgttcttttaacagcagggccgccacagatgagtctactccgccggacatgccgacgacgactcttgtatcctccggccgtttttccatttcattcactccaattactacgccgccttattatgtcagccgtttgacaacgtcggccacatgtttggcagcagttttcacttgctcagccgtattgccgaggccgaagctgattcgaatagaggacgtcagccggtcactctcttcgccgaacatagcagtcagaacatgtgacggcaggactgaaccggccgtgcacgctgaaccgctggagacagcgacaccagccatatcaagattaaccagcagcgcttccactgacacaccggggaaataaagattcagaacatgcggcagactatgctctttgtccccgttgacctcgaatgccacacctgcatctctaagcgtgtcggcaaagattgctttaaacgattgatacttctcgtttttttcgtcacgttcttcacttgacagcttgatcgcttctttcagcccgacaatgcctggaacattttccgttccggcacggcgttttctttcttgctctcctccgaataaaaggggtgaaagcttcacatctttactagcatataaaaagcctgtcccttttggcccgttgagcttgtgcccggaaacagacagaaggtcaatatggctgtttttcacatcaattggcagcaacccgaatgcctgaacagcatcggtatgaaaataagctttgtgttcctttaacagctcaccgatttcttcgatcggctgcactgttccgacttcattatttccatacatcactgtcacaaggattgtatcatcacgcagtgcttctttcacctgttttgcactgactcttccattttggtcaacgtccagatacgttatgtcaaatccgtctccctcaagtttttcacatgtgtgaagcacggcgtgatgctcaatttttgttgtgatgatatgtctgccaagatcttttcttgcaagtgcggttcccatgatcgccaagttatcagcttccgttcccccgcttgtaaaaatgatctcctgctctgccgctccgatttctgctgcgatctgcgctcttgcttcatccacccattttcgagattctctgccaaatgaatgaatactggagggattaccgaaactgccggagaagtgcggtatcatttgttccagcacgcgctcatccatcggagacgttgcggcatgatctaaataaatccgttccattatgtttacacctctgatctaaatatagaacatataagcttcttgctctccgtctgtatagctggcaagatcctctaatgttgtactgtctaaaacctcttttacagcatcccggatgcgaatccagagctcacgcttggcaggctcctcatcttccagcacttcaacagggctgatcggcccctcaagcacacggataatatctcccgcagtaatggcatccggctcactgcctaatacatatccgccatatgcgcctctgatgcttttcactaaaccggcatttctgagcggcgataccagctgctccaaataatgctcggacaaattattcgtctgtgcgatgctttttaatgaagtcgggccttcaccgtgcttttttgcaagctcgatcataatggtgagcccgtatcttcccttagttgatattttcaacatgaacacctctgttatttcatgattttccacatttataatggtaatttctatatgtttcgtccgtttattatcttatagaccaactgttattataacataccttcagcgaattttcattgaggcagaaggaaaggggcctttacccttttctaatgtacggttttccgttaccctgtaattaagtaaggagagatgatagatgaagccattggcatatcggatgcgtccgacaaaaatagaggatattatcggccagcagcatctggtggctgaagataaaattattggcagaatggtccaggcaaaacatttgtcatccatgattttgtacgggccgcccggaattggaaaaacatcaatcgcaacagcaatcgccggttcaacaagtattgcttttcgaaagctgaatgctgtcattaacaataaaaaagatatggaaatcgtagctcaggaagccaagatgtccggccaagtgattttgattctggatgaagtccacaggctggataaaggaaaacaggattttctattaccctatttagaaaacggaatgatcattttgatcggagcaacgacggctaacccgtatcatgccattaatccggcgatcagaagccggacccagatttttgagcttgaaccgttaacacctgaactgattaaacaggcactggaacgtgcgctccatgatgagcatcggggccttggcacctattctgtatccattgatgatcaggcgatggagcattttgcccacggatgcggaggagatgtccgctccgctttaaatgcgcttgagcttgccgtgttgtcaacgaaggagtcagcagacggtgaaattcacattacattagaaaccgcggaagaatgcttgcagaaaaaaagcttttctcacgataaagatggtgacgcgcattatgatgtactgtccgcttttcaaaaatcaatccgcggctctgatgccaacgctgctcttcactatttggctagattaattgaagccggtgatctggagagcatcgcaagacgattgcttgttatcgcctatgaggatatcggtttagcaagcccgcaagccggccctagagtgctgaacgctattcagaccgctgagcgagtcgggtttcctgaagcgcgaatcccgctggccaacgcagttattgagctttgcctctcaccgaaatcaaactctgccattctggcaatcgatgaggccctggcagatatcagagccggaaaaattggggatgtcccgaagcatttaaaagacgcgcattataaaggagctcaggaattaggaagaggaatcgactataaatacccgcacaattacgacaacggttgggtcgaacaacaatacctccctgatcctctgaaaaataagcaatactataagccgaaacagactggaaagttcgaatctgccttaaagcaggtgtacgataaattaatgaaaagaaaataaaacaaaaaaacagccttgatcatcaaggctgtttttatgcattatttatccttcacacgtttgatttcaatgtctttcaaaagatccatgacaacatgtccgcccataatcaaacctgcaactgacggcacaaaagcattagaggaaggcggcatttttgctttacgtattttcgcttcgtcattccccacttcttttctgacatcttcccgaataacaatcgggctttcatcagagaaaatcacttgaacgccttttttgataccctccttgcgtaatttcgtacgaacgaccttcgcaattggatcagtgtgcgtttttgagatatcagcgatttggaagcgtgtcggatccgttttatttgcagcacccatgctggagatgagcggaatatcccgttttagacattctttcattaaatgaattttataacaaatggtgtctgacgcatcaatgacatagtcaagaccatagtcaaaaaactgctcatacgtttcctccgtatagaacatttttaacgcgatcacttcacactccgggttaatgtctgcgatccgcgccttcattaaatcaactttcggctgtccgacagttgaaagcagcgcgtgaagctgacgatttacatttgtaatgtcgacatcatctttgtcgacaagcagaatgcggccgacgcctgaccgcgcgagagcttccgccgcgaacgacccgactcccccgactccaagcacagcaactgtgctgtttttcagcgtttcaaggccttcttttccgatagctaattcattgcgtgaaaactggtgtaacaagaacctcactccacattcgtattctggtttcatctataaaatggctgatccatgagcagccgttttttctgcgcacaaaaaataaagtcccaatagtgccgttgcagctttcctttgttttgaacccgctctcagcaggtgggtgccctcttttaaatcttgtaagtcctctttaccgaatgaaaagaggcatgtacgccatttaaaaatgcgggctcccaaatcaaaaaaatgttcggtcaaaactaggtgtacaactaacacatcaggactttatttaacttgtcaaaatcatatcacagacgattttgattttcaagaatcgaactgcaaattcagttcttaacttttttcttgatagaaagatgaagctcgtcaagctgggcgtcgcttacttcgcctggcgcttctgtcatcaggcagcttgcacttgccgttttcgggaatgcaatcgtatctctcaggttcgtacgtccagcgagaagcataacgagacggtctaagccgagtgcgattccgccgtgcggaggagcgccgtattcaaatgcttccagcaggaatccgaactgttcagccgcttcttctggtgagaagccgagaagcgcaaacattttttcctgaatatccttttcgaaaatacggattgaaccgccgccaagctcatagccgtttaagacgaggtcataagcttgcgctttcatgtcttcaggcgctgtttcaatcagctcaaggtcttctcggacaggcattgtgaacggatggtgcgctgcgtaaaaacggccttcttccggatcatgctctaatagcggccagtcgatgacccataagaaattgaacaatttttcgtcaatcagtccgcgttctttcccaagctttaagcgcagggcgccgagtgatgcggccacaacttcgaattgatccgctccgaacagcagcaaatcaccttcagcagcatcaagtgcttcaatcagcttagactgcttttcttcatcaaagaatttagcgatcgggcctttcactccgtctgcctcaaccttcacccaggcaagcccttttgccccgtagtttgcagcaaaagcgccaagagcgtcgatgtcttttctggagtaatcgccggcaccgccttttacattgatggctttgaccacgccgccgtttgctacagctgatgagaacactttaaattccgtatcctttacaatgtcagacacatccgtcaaaagcatgtcaaaacgcgtatccggtttatcagacccgtacttgttcattgcttcgtcatacgtcattcgaggaagaggaagctgaagttcctcaccttttgtttcacgcataacctttgccatcatctcctcagccaatgacataatgtcttcctggctcataaaggacatttcaatatcaatttgcgtaaactcaggctgacggtccgcacgcaagtcttcatcgcggaaacagcgggcaatttgataatatcgttcaatgcctgataccatcagaagctgtttaaatagctgcggagactgcggcagcgcgtagaactcaccttcgtgcacacggctcggcaccaagtagtcacgtgcgccttcaggcgtgcttcctgttaaaatcggcgtttcaatatcaagaaacccattttcatctaaaaagctgcgaacagctttcgtcacgttatggcgcagctgcatcgtctggaacatagccggtctgcgcaaatctaagtaacggtgttttaaacgaacgtcctctgacacttcttcagcttgatcagaaatcgcaaatggaggtgtctttgcagcatttaatacgttcactccatcagcatgtatttcgatcgcgcctgttttcaaattcggattaactgttccctcttcacgcgccaccacttttccttgaatatcaagcacgtattcatttctgatgccttccgcaatagcaagcgcttcttttgacacatcagggttaaaaacgacttgaacaatgcccgtacggtcacgcaagtcaataaaaatcaatccgccgaggtctcgtcttttttggacccagcctttcagcgttacagattcgccaattgctttttcagttatatcaccgcaataatatgttcttccaaacaatgcgtttcactccttatcccttttggtttgccttcatcacatgtataaattcatcaagtgccacttcaatctgttcgcccgtctgtgcatcctttacattgattttgttttgggcaagctcatcttcacccaaaatcgcaataaatctggcctttaagcgatcagctgttttaaactggcctttcattttcttattttcataatcgatttcactggaaatgcctgcttctctcagtttgtacaccaatgaaacagaataatcctttgctttttcgccgagtgtgacgatatagcagtcgattcccttatcaacaggcagctctcttttttcagcatcaattgcggcaagcaagcgttcgatgctcatcgcaaatccgatgcccggtgcttcaggtccgccgatctgttcgacaagcccgtcgtagcgtccgccgccggcaagtgtcgtaatcgcgccaaagccctccgcattgctcataatttcaaatgcggtgtggttgtaataatccagccctctcacaaggttcggatcgatttcatacgaaatgccaagatcatttaagtattgtttcactttttcaaaataagcggctgattcttcatttaaatatgtcaaaatcgaaggtgccgatttcatcagctcatgatcacggtcttttttgcagtccaaaattctaagcgggttcgtgtgcagccgggactggcagtctgaacaaaattcttcgatgcgaggctcgaagtgtttcacgagcgcttctctgtagcttttgcggctatcttgatcgccgagactgtttatgacaagcttaacgttttctaaacctgctttttcataaatactcatcgcaagcgccattacttcagcgtcgattgcagggtctttcgaaccaatcgcttcaattccaaactgataaaactggcggtaacggcccgtctgaggacgttcataacggaacatcggcccgacataataaagctttgtcggctgtacaggatttgcgaacagcttgttttcattaaaagcgcgaaccgcagcagctgttccctccggacgaagcgtcaggcttctgcctttgcggtcctcgaaggtatacatttctttttgtacgatatccgttgattctccgacgcctctggcaaacagttctgtatgctcaaaaatcggtgtgcggatttctttatattgataagtgcggcaagtgtctctcataatttgttcaacaaactgccagcgatctgattctccaggcagaatatcctgtgttcctctcggaatgttatatcccataggtagacctccttatgtattccttataaaatatccaatgatcgttaatgatgaaaatgaaaaaaactcccgcccctactatacatgatagtagggacgagagttatacccgtggtgccaccctagttggaatacgttcatattcccgctcgatcctttaacgcaggttcacgttcactgcctaatggcgttattcacgcgttcagcaggaaacctccggagtgttgtttcgagaaagacgcaatgggatccgctttcagcctggggcgggttcctctctaatcatgcaatctgacctactcttctccattattggttcaaatctttcatcatttgctatgtactcaatttctattataataatgggattggggttctctgtcaagctttattccggttgtttttcctcagcgctgcttctttggacataagaccaaattcagatgctgtttccgtaagataaccagtcgtatcgggatctgcgtgatcgctgtaatgcagattcgcttcaccgtcgtgaaatgcacgtcccatttttggatgatatttcatgatttgcacacctttttgattgtatttacgcttagtataaacaaatcattttatttttatttaaaaatcagaaaggactttacgatattaaacaagaatgcttttttaatgatcatcagaaaggaggacacaatgaacaagaaatactttgtccttattgtatgtattattttcacctcagcgctattcccgaccttttcatccgttacagctgctcaaggagaagcggtcatcgcaacagatgaaatgaacgtcagaagcggcccagggcttagctacggcattacagcggaagtaaaaaagggagaacgctatccaattttaaaggaagatggagactgggtgcagatacagcttggttctggagaaaagggctgggtagtctcctggcttattacaaaggaagaccaggccagcacaagctcctcaggaagcagtgacactgtgacatcaacagaccccgatctgcggatgagaagcggcccgggcacttcctacgaagtcatcggcaaattcccgcaaggcagccaagcatctgtcattgataaagattcgggctggatcaagatatcctatcacagtgccaccggatgggtatcatctgaatatgtcacatcaggaggcagcagttcagcgtctgatgagagtgaccaaaccgaggattccggtgcgtcaacgacgggcacagtcggtgtttcttcgctaaatgtaagagcctccgcctcacatgacgcggcaattataacaaaacttgatcgcggaacgaaactgacggttctcaacgagaaaaatggctgggctcacattgaggtgaacgggctaaaaggctgggttgcaagccattaccttttgactagttctgttccagctgatgattcagcaaatgccggcagttcatcctccgctaaaaaagcctatatcatgtacggaggaacgaatctaagaagtgatgcgtcaacatcagcttcgatcgttgagcgcgctgccaaaggagattcatacaccattaccggttcaaagggaagctggtatgaaataaagcttgataacgggcagactgcttatgtagccaattgggtggtccaaacgtctaaaagcgcagaagaagcaggtgaaccgccagtctctgattccccgtctggaaacggctctctaaacaataaaacgattattgttgacccgggacatggaggaaaagacagcggaacgatcgggtattcggggaaattcgagaaaaacctgacgatcaaaacggcaaaactgctcgccagcaaacttagatcggctggagcggatgtatatgtgacacgccaggatgatacctttgtcagcctgcagtcacgggtctctacctctcactaccgtaacgctgacgcctttatcagcattcattatgacagctatgcggatacctctacaagaggcagtacagcatattactacagtcctgccaaagatcaggaactcgcatcagatgtccactcagaagtggtgaagcgttcttccattccagaccgcggcgtattattcggagattattatgtgctccgggaaaacagacagcccgctatgctgtacgagctgggatatgtaagccatccgcaggaagaagccattgtacatagcaattcataccaagaaaaagtaacagatgggatcgaaagcggattagagaaatacttccaataaaaaaagctgccttttggcagctttttttattttgaatccataatgagcgtgaccggtccggagtttgtaagctgaacatccatcattgctccaaacgttccggtctccactttgattcctttttcacgaagcaggtcattccatttttcataaagacctaaagctttatcaggtttggccgcgttcatgtagttcggccggcgcccttttttcgtatctccataaagcgtaaactgtgagacggataaaatctctcctcctatatctacaagagacagattcattttcccttcactgtcatcgaaaatacggagattgacaactttatcggctaaataagctgcatcatcttctgtatcatcgtgagtgatgccgaccagcaccataaggccttgtccaatttggccgacgacctcttcgtccactgtaacgcttgcttctgttactcgctgaacaactaatctcttttctaacccctttagttcatgacgcggcgcacagaatagatatctctaatctgtttaatacgctcgacgactttatgcaagtgattgatattctggataaaaatcgccatatggatggttgccactttattgcgatccgatttgccagagacagatgaaatattggttttcgtttcattcactgcctggagtacctcgttcagcaatccgcggcggtcatacccaagaatctctatctcaacattgtattccttgcgcttttgaacttgtgactcatgttcccactctaccgggatcagccgctcttgggcttcattcgttttgacattcggacagtcttcgcgatggaccgaaacccctctgccttttgtgataaagccgacaatatcatcacctggcacaggattgcagcattttgataaacggacaaggaggttgtcaatgcccttgacacgaacgccagcttcccgttttcttccttgcgggtatggcttaggttccccagtgacttcctgaacgatcttttcctgttcttcctggtcgcgctgctttctctctttttctgttaggcggttcgccacctgcagagctgtgatgccgttgtaaccgaccgccgcgtacatatcctcttcatttgagaaattaaatttgtcagcaaccttttgaatattctccggcgttaaaacatccttcaattcaaaatccaagtttttaatttctttttcgaccagctcacggcctttttcgacattttcttcacgccgctgtttcttaaagaattgacggattttatgcttcgcttgggatgtttgggcaagcttcacccaatcctggctcggaccgtaggaatgcttagaggtgagaatttcaacgatatcacctgtccgaagcttatggtcaagcgtaaccatttttccgtttactttggcaccgattgttttattgccgatttcagagtgaatccggtaagaaaagtcaatcggaacagaaccggacggaagctcgattacatctccttttggcgtaaagacatacaccatgtcagagaacaaatcaattttgagcgattccataaattcttctgcatctgtcgattcattttgaaattctaaaatttcacggaaccaagaaagctttttctcaaaggttgcaccttcattggctgctttcccttctttataagcccagtgagccgcaaccccgtattccgctatttcatgcatttcaaaggtgcggatctgcacttcaagcggatcgcctttaggcccaataaccgttgtatgaagcgattgatacatattcggcttcggcattgcgatataatctttgaatctgcctggcatcggtttccagcatgtgtgaatgatgccaagcaccgcgtagcagtcctttatgctattcacaagaatacggacagccaacaaatcgtaaatttcattgaattgcttattttgcagcaccatttttcgataaatgctgtaaatatgtttcgggcgtcccgagaagtcagccttgatatttacttcttcgacacgtttcttcacttcattgacaacctcatcgacataaagctctcgttctgcacgtttcttcttcatgaggttgacaattctgtaatattgctgagggttcaaataacggagcgccgtatcttccaattcccacttaatttttgaaatcccgagacgatgcgccaaaggagcaaaaatttccagcgtttcattggagattctccgctgtttttcctgaggcagatgtttcagtgtccgcatattgtgaagacgatccgccagcttgatcaatatgaccctgatatcttgagccatagcgacaaacattttgcgatgattttccgcctgctgttcctcttgagatttatatttaattttgccgagtttcgttacgccgtctacaagcattgccacttcttcggaaaatgcttctttcaggtcatcgagcgtcacatctgtatcttccacgacatcgtgcaaaaatccgcccgcgattgtggaagggtccatttcaagatcaacgagtatccccgcaacctgaatcggatgaataatatatggctcgcccgatttgcggtattgctcgcgatgagcatcttcagcgtacagatatgctttttcgacaaatgcgatatgctcatcagatagatagctgcgtgctttatctataacttgctcggcagtcaatacttgttcgttcgccatggaatcaccttttttaaaatgtaaactgtattgtagtttattatcaagaaaaaaacgaaagatgtaaagagcagaagttcaaatagccaaatattatataaaataaatgcaaaacaataggaaaaaagcaccctgacatggagtgctttttcgttatgcggttatccttagtatttcatcaatgttaagatgtcgtaatcttcgagcttatttctgccgtcaaggtaagaaagctcgattaagaaagcgataccagcaacaacgccgccaagttcttcaacaagtttgattgtcgcttcaattgtgccgcctgtcgcaagcaggtcatctgtaataagcacacgctgaccaggcttaatcgcatctttgtggatcgttaatacgtcttttccgtattccaagccataatccactttgattacttcacgaggcaacttgccttctttgcggaccggcgcaaaacctacgccaagcgcgtaagcaacgggacagccgataataaagccgcgcgcttcagggccaacgaccaaatcaatttgcttttctttcgcatattcaacaatttgatctgtggcatagcggtatacatcgcctttatccatcagtgtcgtaatatctttaaattgcacgccctctttcgggtaatccggtacaattgttacgtattgttttaaatccatctgttttatgtcctcctcgtactttcataagcctctgaatcttgtttcatcagcttattcagccattccttcagctcttcagcagaagaataattcagcttttgatccagttccatcagctgctgtttcgcctgatatgtttgtgagtctgttaagtcgcgtttctttgctccgctcacaacagacagcacaccattctctattttaacaaaaccgagatcaaaaaacacctttgtcatgaaattgattgtttcaacggaccagcctttatgttttgcaagctctgaaccgtgttttttcacgtcaaaagcgcctcttttcagcaagaacgcataataccatttaaagtggtctcttgcgggaaaagttgataaaaagtggtcctcatgattgagaaaaataaaatatatccgctcgggcgcctttccttccagcaaacgtgcgagcatgtccagcgaaggcggcggatccagtaatacaatatatgcaccatcgaggtcaaacgcctttgcttgatctttagaactgatgacgtgcacttctcggcgaaggtcttcagtttgaagtaatgttgttgagtcttctttgaaagagacaatggcccgtttagcagatggaagggcggaaactgtgtcttcccacgtccgttttccccttaaatcaaacagctgccattcagaaacagcggcatcctttatcataagctgcggcttttttcgattgttccattcgttgattgacatctcaccgacaatggaaattcttgaacccggtacgatgccttcttgaagctcgcctttattaaaaccgacgcaatcaagctgggacgactcgtttctgatcgtcattttgacatgagttttatttgcccctatcttgcggacatcttccagtactgcattttctacgagaacgtgcggtttcgggttcagcatgccaaaaggagacagcatgttcatttctgcgatgctttcaactgtaatgtcttcgacgccgcagacaaggtcgacttcctgtacgggaataaaatcctcttccgtaagcgtattgtccgctatttcattcagcctgcttcgcaaatccggcacatcttcggctttcagcgtcatccccgcagccattggatggccgccgaaatgaggaagaatatctctgcattcagaaaggctctcaaataaattaaatcctctgatgcttcgggccgaacctttagcgattcccttttcttcatcaataccaagaacaatggccggtcggtagaaacggtccacaagctttgaagccacaatcccgacgactcccgggttccatccggctttggccacgacaattgcagtttgatcgagcccttgctgttcaaccatttcaatcgcttcatccgtcattttgctgaccattttttggcgctctttgttcagctggtcaatttctgcggcaagctcttccgcttcaaacgaatcctctgacataagcaaatgaacagcgggatccgcctgttcgattcttccgacggcattcagccttggtgcgagctgaaatccgactgtttcttcgttcgcttctccgatgtctccgcctgacagcttaatcagctcttttaagccgagccgatttgtccgtcgaagcctttcaagtcctagtgttgctattaatctgttttcgtcatgcagcgggactagatcggcaatggtgccgatagccgccaggtcaagcagttcatcaggaagttcacccaataaagcgtgggcaagcttaaacgcgactccaaccccggcaagctctttaaacgggtaagtgcagccaggctgcttcgggtggacgatcgcacggacatccggaagctccggtcccggttcatgatgatcggtaatgatgacatccagtccgagttcctttgccaccttcgcttcatgcacagcggcaattcctgtatcaaccgtaatgatcaaagagaagccccgttctttaatcgaacgaaacgcctgttcattaggtccatatccttctttaaaacggtcaggtatataaaaatcaacttgagccgacagtttttgcagcgtgtgaagcatcactgacgtacttgtaaccccatcggcgtcataatcgccatatatcataatcttttcttgttgtgaaatcgcctgttttattcgatctgccgcttctttcatgcctttcatttcaaaaggatcataaaaatcggcatcctttgtatgtaaaaacagcctagcgctttctgccgtatcaaagcctctttttacaagcagggacgcaacaagaggtgttatatgcaattgttctgtgagtgatttgaccttatcctgatctggtcgctggatttcccatcgcatttttgacgctaacataaattcacccctcaaccaccctattatactagagcaggctgaggggtttcaaataatattcgaaaactagtcttttttctcaatcatggctgatgcatcctgtgtgtcagtctgatcagcaagatgagtatcctcttgtttatgtattgctgttctattttctttccgcaaggtttttatttcccgcttcaatttcattacctgaaaaatgccgacagaaaatacgatcagtgctcccattaaaactgagcccaaaataacaagaatgagcggccattctgatcttccaaacaggtaatcaacttctacggatcgaacattaatgactgcgaaaatagcgacaattaaggtgaaaataagtgcgaaaataatggtccattgtttattcattctcttttcccccaaacttcttattgaggtaactttcccaatcaagactggttttaaacatggcttaacactaggttaagctccctttgctgttaatttttcccggatcagcctcttcagtccggttccctcaccggaaatcacaagtgtatcgccttcgtcaatgactgtttcagagctcggattcagttgtttatcctgattctttttaacaattgcaatgaccgtcacatgatattcctgacccacattcaaatcaccaatcgtctgatgaatggcaggcgctcccgcctctgctttacaccactctataatcaaatcatcaagggctgactcgacctgttctaatgctttcggtttatatgccattccgccaagaattgcagacatttgccttgcttcagcgtcatcaaactgcacggaggcaacacattcctcatggtcgttttcgtcaaaatagtaaagctctctccgtccgtcatgatgaatgataattgaaattttatcacggtttctagtaatcatttcaactttttgtcctatgcccggcagctctgattcgcgaaccctcatatataaaccctcctacatatctgaaaaccagccataaacacttttaacaccatatatatgtttaaatgtaagcgtatgtcattatagcaaatgtctattttaagttcaatgaaacttcaaaaaacaggctgccctgcagaggacagcctgatattttttattgcgccgaatcttttttcagttctcttcctttccatgcaagccaaatttgtgcggcaatgtatagagaagaataaacgcctgttaacagcccgaccaataaagcaattgagaagttagtaatagaagatgctccaaagatcagcaatgtcacaacaacaatcacaacggttaatacagtgttaattgaacgtgtaaaggtttgctgcaggctcaggtttacaatatggttcagatcggcaaaggttttcggcttacgctttttcatatgctcgcggaccctgtcaaatgtaacgattgtatcgttaatggaatacccgattatcgtcaagatggccgcgatgaatgtaacatctacctcaagccttgtaatactgaagaacgtgacgataaagaatgcgtcatatagcaatgaggcgatggcagcaatcgccattttgtattcgaatcggattgaaacgtaaataatgatgccaatagaagctatagcaactgcgtacagcgcatttctcgccagctccttaccgactgtcggtgaaactgtgctgacatttggatcagatccgtatttgtctttaaaatacgtttttacttttgcaatggtttctttatctggcaccccgacaaaacgggcaacaccgatattgctcttttcgcctgacagaactacagtatcagggtccatacccagagattcaaaatccttctcaacttgctctgtcgtcagcttatggtcgctttgcacttcaatccgtgcaccgcttgcaaagtcaatgccaagattcagcctgaacacaagcaggataataatcccggcaaccgtgaccgcactggagaaaataaagaagtatttgcgtttgctcgtgaaatcccatttttggaatggcgtatgcggctctgtattttcatccgtatcctgaatatccatgatatgtttcttattgacaccaaaccagccttttttccgatcaagccatctgctttccacaaggagagcgaggagaaatctcgataagaaaacggcagtgataaagcttgtcaaaatcgataggatcagcattgtcgcaaaccctttaacagagcttgtcccaaagataaagagcacaaccgctgcaataatggttgtaatattcgcgtcaaaaatcgtcgcaaatgaccgtctgtttcctgaacggaaggcagagcggactgactttcctagcttgagctcttctttaatccgctcataggtaataatgttggcgtcaacagccatcccgacacctaaaatgagagcggcaattcccggaagcgtgagtacggcattcatccagtcaaagatctggagtgtaatgtagatataaacagacagcgtaatcaccgcgattaatcccggcagacggtaatagaaaagcataaataagaaaataattgcgataccgacaataccggcaaacaccgtatcatggagagcctgctggccgaattgcgcgcctactgatgtcgaatacttttcagtcagtttcacaggaagtgcgcctgcgtttaaaatgctggctaaatctttcgcttcttgagctgtgaaatgaccttcaatttttacatcagttgtatttagttcctgacttacatttggagcggatacaaatttaggatgctctttttgaacttctttcttaaaggaatcacctttatcataatccaaccaaatgacaagctggttgtttggcgccattttcatgaccttcttggtcacttcaccaaatttatcagcgtctttcagcttaatcgtgacaattggctcatttgttgtgctatcataagtttgtttagcgccgttttcgactagatcagcaccgtttaacagttccttatcatttgcatctctgaaagaaagctgcgcttcagtcgccaaaatttcacgcgctctgttttggtttgtcacgccagcgagctgaacgcgaatccggttattcccttcaatttggatgttcggttcgctgacaccgagaacattggcccggcggttcagtgcctctactgtgctgaccagaacgtcttttgtgattttgtcacctttttttacaggctgtacatcatacagcacctcaaatccgccttgcaaatccaatcctaacgtaatattgttagcggcaggcttcgtaaagtagcccaagcccgtgccgatcaatagaacgaaaaggaaaaacgcaatcaagcgtccttttttcattatgtatatcctcccttaaacctgtgcgaatcaacctgctatctcagcagttcttccaatgcttcctggccctcttcactgcccagccaattagacgttttaaatgactcaacggttgcatagttcataaattcgccaattttcactgataaaatatcactcgccagttcataaatgctcagttccgttttctttttccacttcttatctgttaagtatgaccacaaactttcgagttcaacatcatcatacccgagaatcttaaactcttccagtttgctgtaaagaaacggcctgacgtggtctttatatagatcggctggatgcttctccacgaattccacgctccttttttattgtttttcaagaagacttgtcatgcttggacgacatatacgcatatctttattgtatatgattccaggtagtttgagaaggcagggggtaaaaatggcgaaacagacgtttttaaagggcactcttatccttatcgcagcaggaatggttacaagaatgctcgggtttgtcaaccgggtggttatcgcccgttttatcggtgaagaaggagtcgggctttacatgatggcagcgcctactttcttcttggccactacattaactcaattcggtctgccggtcgcgatcagcaagctagtcgctgaagccagtgcgcgcggagatcatcaaaaaacgaaaaatattttagtcatgtctctgaccattacgggagtgctcagcctcatctttacaccgctgtttctgtttttcgcccctgttatggctgaaacgatgctgacagataagcgaacactgtatccgctcttggccattacgcctgttgtgccgattattgctatatcgagtgtgctgaggggatactttcaaggaaaacagaatatgaacccgcttgctatgtcacaagtccttgaacaggttgtccgcatttcactcgtggctgtctgcacaacgatttttctcccttacggaattgaatatgctgcagcgggggcaatgctatcctcagtggcaggggagctggcatcacttctttatttattcgtttgctttaagtataaaaagacaattaaaatcagaaagcattttttacagtcaattaaaaacggaaaacaaacctttacccaattaatgagcgtgtcccttccaacaaccgggagccgctttatcggaaacctctcttggtttttcgagccaatcgtcgtcgctcaaagccttgccatcgccggtgtggcaacagttgccgcaacaaagcaatacggggaactaaccggctttgccatgacgctgctgactctgcccagctttattacatattctttgtcgaccgcgcttgttcctgcgatcagtgaaggaatggagcagaaaaaattgcaggtggtggaataccgcttagaacaggcgatgcgtctctgtctgctcagcggaggcatttcagttgttattttatttgtatttgcggatgagctgatgagagtgatgtacggttcctcaggcgcagctgtatttataaaagtgatggccccgttttttctgctttattatttccaaggcccgcttcaagctgtgctgcaggcgcttaatttggcaggagctgcgatgatgaacagcttaatcggagcgcttgtcaaaacaggccttatttttgtccttgccacaaggccttctcttggcattatgggcgcggcattagccattgtgacaggcatggtgctcgtcacgctattgcacgcagcaaccgtaagcaaagtgctgccgatcagcatcaaaatcaaggagtacgcgctcagcttcgctgttattgtaatttgcggattcatcagctccgccatcaaacaatatataagctttggagcatctgaggctgtcaatctagccggatggattgcggcgagcgccgccatttatatgatcctcctgctcgttttccgtttaattaaaaaagatgagcttcgccgcattcccattatcggacggttgatcatccgataatggtcacgtgcggtgcccatctttttcatcaatatatatttctccgtctgtaaacgagcaaaatgaaatatctgaagggtttgtgtatccgtgtttttgcaaactttcaagcagccattttctatctttactgattctggacaggttttctgtttgaatgaagccgtctataatgagcggcatttcgagctgccgatgctctccgctgttttctttcttaacaatagtcagtttgcccgacggctctaaaatagcaaatgatacgtcagctactctgtcgatgctattttctctgagctgaaccattaaatcatcaaaattataacgctgtgatttcatggcttcttcgtcaatttttccatatttgataattatggtcggcttaccgtcaagaagctggcggacttttcggttttttaaagaaaagtatgccaaagtcacttgaatgatcattaatacaagcattggcaaaatggtatgaaatagatgatcgtctacgttttctatggctaaaacggcaatttcagccatcatgataaagacaacgagatctaaaatactaagctctccgatctcccgtttgcccatgaaacgaaaaatgaccaatatcacaaaatacaatacgactgtgcgaaacgcaatagtgagaagctcttccattatgcacctccaactcattataggttgcaacaaaatgatcaatttatgtaagaaaaaccgattgcatttcacaaagcttttacgtctaattcatgggataagggaatacatttttacaaagacgagccatcagcatgtctgacggttttgaacaaaaagaacagaagccttttaatacaggcagagaggagacaatcatggaggaaacgaaacaagttggaaaaggcattctttacggcttaatcgccatattttcagccatgctcctgacaagtttagcggtttcacttttattgaccgcaacctcgctggaagaatcatcatttaactggctgatcaccgctatctcatttctctctttatttatcggcgggttcatttcaggcgggaaaggcaaggaaagaggctggatgattggcgcattgaccgccttaagtttttctctgattatcttattgtttcagtatttaggattcggaaagacatttacagcagaacagctgatcttccatctgggatttttaggggtgtgcatgctgggcgggattttcggcgtgaacatgaggggaaacaggtcttccacataaaaaagagcgggctcacttgcccgctcttttttgtttgctatgtatagctcctgctgttattcagcagcagaaacttctctgatcgcgcggcggtcgaacgtaagacgtgtgttatcaccagtcttaattacgactttgctttcgtcgatagagtcaacagtaccgtgcaatcccccgattgtcactactgaatcgccttttttcagttcctcttgcatttggcgtacagccttttgctgcttttgctgaggacgaatcagcaagaagtaaaggaccgcaaacattaaaataataggaaccaatgtacctaaagtgccagtcatcattttcacccctttctgtaagcctgttatgtttatttagaagcttttcgcatttggcttgttatagccgtaacgctcaaagaactcttctctgaaatcacccagacgatcctcgcgaatagcctgtcttacctgctccattaagtgtaacagaaaatgaaggttatggtaagttgttaatcgaaggccgaatgtttcattgcagcgaatcaagtgcctaatgtacgcgcgagtgtagtttttacatgtatagcaatcacactcttcatcaatcggacggaagtctctttcaaatttcgcatttttcatattgagtcgtccttcagcagtaaacactgtgccgtttcttgcaatccgtgtaggcagcacacagtcaaacatatcgaccccgcggatcgctccgtcgatcagtgcgtccggagaacctactcccatcagatatctcggtttatccttcggcaagagcggtgttgtgaattcgagtacacggttcatgacatccttcggttcacctacagacaatccgcctatagcatatcccggaaaatcaagcgaaatcaagtccttcgcactttgtgtccgcagatcttcatattctccgccttgtacaataccaaacagcccttgttcatcctgacgattgtgggcattcaggcagcgttccgcccagcggcttgtccgttcaactgacctcttcatgtagtcgtactccgccgggtatggcgggcattcgtcaaacgccatcataatatcagagccgagtgcgttttggatctccatcgctttttccggagataaaaacagcttgtctccatttagatgattgcggaaatggacaccctcttcctctatattacgaaacttgcttaaagaaaagacctgaaaaccgcctgaatctgttaaaattgcgcggtcccagttcataaatttatggagcccgcccgcttctttgacaatgtcttggcccggacgaagccatagatgataagtgttgctcaaaatgatgcctgcatccattgctttcagctcttcaggcgacattgttttgactgtcgccagtgtgccgaccggcataaaaaccggcgtttcgaaggagccgtgaggcgtatgcactttgcccagccgcgctcctgtttgtttgcattcttttataaattcatagcgtattggttgttcagccacttttgatgaggcctcctgttctcaaattatataatcagcatcgcgtctccgaagctgaagaaacggtattcctcttccactgcatggttataggcacgcagaatgttttctcttccagcaagcgcgctgaccagcataatcaatgacgatttcggcaaatggaagtttgtaatcattccgtcaatggctttaaattcatagcccggataaataaaaatagatgtccagccgcttgatgctttaaattgcccgtcatgttctccggcaatcgtctcaagcgtgcgtgtcgaggtcgtgccgacagaaatgatccgaccgccattttctcttactttgtttaaggctgcagccgtttcttctgacatttgataaaactctgcatgcatattatgctcttccacttcatcggcactcacagggcgaaacgttccaaggcctacgtgcagtgtgatgaactcaatttgcacgcctttgtctttcagctgctgtaagatttcttccgtgaagtgaaggccagctgtaggcgcagcagcagagccaatttcttttgaatacactgtctggtagcgctctttgtcatcaagctgttctttgatatatggagggagcggcatctctccaagggattcaagcacctcgtagaaaataccgtcatattgaaattccatctttctgccgccgtgctcaagctcttccgtgcagattgccttcaatcttccgtctccaaatgtgacaacagttccttttttcacccgtttcgccggtttggcaagtgtttcccatttatcaccggtttcctgtttcaacaaaagaagttccactttcgcgccggtatcctcttttgtgccgaataaccgcgcaggcagtacccgggtattgttcaggactagacaatcgccttcgttaaagaagctgataatgtgtttaaacgagctgtcagtaagctctcctgtatgtttatcgagcaccatcagccttgaagcatcacgctgctccaacggtacttgtgcaattaaacgttctggtagttcaaaatcaaataaatcgactttcatgatgatttcacctttattctagtcttttgttatttcattctgccaaaaagattaagcaaaattgataataccacacttataataatacaagtgacaaccgggaagaaaaacgtaacatttcctttttttacaaaaatatctcccggcatcttgccgacaaaatgcaaaactgctccgataataagcaaaacagcaccaagaatcataatgatcttaggaaattcagtcatatcggggagcctccatttggaaatgatgataaacggccggtgtcacgatccttccacgcggcgttctttgtataaatccaatttgcagcagatatggttcatatacgtcttcaatcgtatgcgattcctcgccgatggtagctgaaatcgtatcaaggcctactgggccgccgttgaatttttcgatcatgcccatcagcagcttatgatcaatatgatccaaaccgaggcggtcaacctgaagccgctccagcgcattctgagaaatgtcttccgtaatcctgctgtcacccagcacttgggcgaaatcgcgcacccttctcagcaggcggttcgccacgcggggcgtccctctcgatcttcttgcaatttcaagagccgacggtttatcaatctcaacctcgaatacatcagcggttcttgtgacaatatccgccagttcttcttgtgtatagtactcaaggcgagacattacgccgaatctgtctcttaaaggagccgtcaaaagccccaccctcgtcgtggctcccaccagcgtaaaaggcggaaggtcgaggcgaaccgagcgggcagatgggcctttgccaatcacaatgtccaggcaaaagtcttccattgcaggataaagcacctcttcgatcgatctgtgcagcctatgtatttcatcaataaataatacatctcccggttccagcgccgttaatatagcagccaaatcaccaggcctttcaatcgcaggccctgatgtcgtccgcaattccactcccatttcattagcaacaatcgaagcaagcgttgtttttccgagtccgggcggcccgtacagaagaacatgatccagcgtctcctgtctcattttcgccgcatctataaacacgcgcaaattttcttttaccttatgctgcccgatatactgtgccagattttgcggcctcaggctttgctctatcactgattcatggttgtctgcttcacttgagacgagccgttcatccatgaacatcaccttactttaatagtttttgtaatgcttttttcacatattggtctgttgtcagcccaatttcttctttaaggtgaggaagcacctttttgatttctttttcagcatatccgagaaccctgagggcttcaagtgcttcttcaagagccgtttccgctgtttgcttttcaagcctttcttcatgattaaacagattttcaatcatttcaggcacaacatctgccagctttccttttaaatctagaataatctggcgtgcggttttctttcctactccaggaaacttgaccaaaaaagcttcatcttcattttcaattgcttggatgaccgctccgggatcacccgagcccaagatggcaagtgctcctttcgggccaattccggtcacgtttaacagctttgtaaagagcgccttctcctctcttgttgaaaaaccataaagcgaaaaagcatcctctctgatatgatggtatgtaaaaatcgtttcttggcttctctccttatatataaacggattcggcgtgaaaatctgatagccgatgccgccgttctctatgacaatatattggggagatacataatcaatcgtccctttaacaaattcaatcacgcaaattcacctctttgactgttcttcattgtaccataaaaacagccaaagtcttatagaaaagttaacatatgttcgcttctctctcattctttcacgaaaaaaaagacatgaatacatgtcttcaatcagcggacgctacccgctgtatgtcttcatatgttcgatgacatcctcaaactccgcttttgtccgaaatggaatgcctttcagcagatttttttgcatatggctttccagcctttctaaatcaatttgaaaaaaagactgaattggttcggaagctggctcaggccgcccatgaaaagtggaaatcactccattatccgatacaccgatatacccgttgaccttgctgagcggagaaatatcgtccatttgcttccggaagagcacatatccctttttttgttccactagcgtccatccggcataagctgcccaaaaatcatccatagaaaacactttttcatgcttatgctcaatgctgacatcgccgtccaaatacaccttttcaagctgcacatgcacctgcagcggctcatagtgctccacttccgcgccaagtgcgcgggaaggagctcctattaaaaatactgccgctgagcaaagaatgcccagcaaaagatacgccgtgctgaatcgtttcaccctctacacctctttgcacacgtttatgattagtttgaccaaagaggctactgcttaaccgttttatcaaaatttgtctgcacattttccctgacaaaccgttcctccgtatacacatctgtgctttgctcagaaattgtcaagaatcgcgtcagaaaggcactgaaaaaatacaatgccgcaaagatccaaatcacgccacctgcaccgagcggcccaatgaaaagactcacgatgcccggcgcgataaacgcacataaaccagatcccaaattcaacactgacatggcagcacctttattatcaggtgcaagcgtcggcaaaagcgcgcttaatgggacgtaccctgctaaagccgcgccgtagcagcaggcgataatcatgagcacccaatactgatgcccgatcagctgaggcgtgtaatacagcgccagcgtaaaaataccgcatccgacaccgccaaaccacatgaccgtattgcgccagcctagtttatctccgactgcaccgaaaatgatattaaacacaatattcacaaaaaacagcgtcccccatatttgcagccattccgaaaccgaatacccgtatcgtgctaaataagtaggaagaaagatggcaaatccaaattgtcctatcgcattaatcgtcttgaccactccgccgatgcctaccttagggttttcaaacataatcgtaaatgccttcgacagttctttccatttcggctgatcttgtttttgtatcggagtaaatttatctttgttaaaaaataaggcaagaattccgcctgccgccacaaacagtaaagcgctccaaagcgtattgatttctccaaaggccggaactgcatagctggaatagaacggaccgagcacgttaaggccgcacgtaaacataaaccaaaaccagccgacggcttttccaagaatattttgagaggtgctgtatgacacccatacgagaaaagagtatgcaaacagcggatatcccaagcctctaagagcatagctgcccaagagagccggataatacatatgaggaatcgcccagccgataaaagcggccgaaccgaggataaatgcaagcaatccgacagtcatcgtttttctcggcccccaagtttggacaaacgttcctgaaagccaagctgagatggtgacagcaatgccgtacatggtaaataacgatgcggattgctgcatactgagaccatgatcaacgagaaaaggagacagccagccttgttcgaggccgtctccaaccataaagatgacaacgccaatataaccccaaaccatgtgagaaggaattccgattttgttcaaaacatttcctttagcatgtactgtattcattttctccaccgcctacttaaagtatcaatggagtatatacccaagcttgctgaattgtaatcctgttagattaaaaagcgattttttcagtgtgctcaatgctaacaggcatgccaaaagcaagcgattgctgtgctgctctggcgatcctcccggcctgtaaaccgtcattgccggtgcagggagtctcctggtttgtgccgatcgcttctgcaaaacggagaatctcctcctcatatgaatccttatagcgttcaaggaaaaagaaatgcggtttatccttcatcacaaaatcagctgttgacacctcaaccgttgtcggcctgctattgtcagccgctgcagagcctttcgtcccgaaaacctcaacccgctggtcatatccgtacacagcttggcggctgttatcaatcacagccatggcaccgttttcaaaagtcagtgtaataacagctgtatcaatatcacccagctccgcaaaagaaggattcaccaaagccgcccctttggcatacacttccgtcacttcgcttcccataatatatctggccatatcaaaatcatggatcgacatatccataaacaatccgcctgacgtacggacataatctatattcgggggttctgggtcccgggacgtgatttttaataaatgaggtgtaccgatttcaccattttcaacaatcgttttgattttcttaaaatgaggatcaaagcggcggttaaatccgacttgaagtgttaccccgtgtttccggacagccgcaagcgcttcactcgtttcgtccagagagaaactaacgggcttctcacaaaatatatgctttttcgcctcggctgcttctttgatcatctgtgcatgtacggctgtaggagagcaaataaaaatagcatcaatatcaggatcatgtaataaatcacgataatcagaggttatgtattcaatctgatgactgtcggcccagctttttatacggctcgcctgaatgtcagagattgcttttattttcatgtgaggaatccggcttatattttgaacatgaagtttgccgatgcggcctgcaccgataatccctgtcacaatctgttttgtcatggcttcttcccccttgatcattcacgaaagcgctttatttaaaattaatactatcccatttgtaagcgcttttcaagaatggaaattaaacgttctatgtctcttttatcacaattcatgcttataagtagccttcttcttcaagaccagatacactagaattaggctctttttcctgaacagtttatgattttcctataaacagctgcataaaatagagcaaagaaggtgaatgaaatgctgacaaaagcagaggcactggcccataccgtcatataccgcaagaacagcagatttgataaagtcaaagagaaatccgaggaattaacactaatcggcaagggaagaagcgcctatgtgtttgccttaacagaaggcggtcgaaaaatggcgctgaaagtattttttccggaatatcaagcgacagcagtcaaagaagcagcgatctatgaaaaattagccgggtccgcattctatcctgacatttacgaaactggcgattcatttattctcatggaatatattaaaggtgaaaccttttataactgtctgaagaaaggcattgcaatcagtgatgacatgattcagcaggttgaagaagcgctttctgacgcccgggcagccggactgaacccgtcagatattcatttgcggaatctgatattgacagaaaccggggcggtgcgggtgattgatgttgcgagatttgagcagacaaaaacatgcacgcagtgggacgacttaaaatccgcatatcatgcactctacaaaaaaccgatattccccaaaaagattccgggtttttggctggagatcatcgcatttttatataagaaagattggtttcaaaagcatttcgcacagcggaaaagaaaatattcttaaatcaaaaaggcagccgcacaagcggctgcctttatcatgtattttttactttctgacggcagaaatcagtttcatttgttcaggcgacagcttaattcgatagcctctcacagttaagtagaccgcttctgggtccttctcgccggaatgacaatacgttttttccatttctgtctcccctcaccctttattggctttatttcatcttatcattgctttattgaggtaattttaaagaaatgtaaagattatatgaatccgatatatagtaaaatgagagaaaaaaagggagagagtcacattaagaccgaaaacaccttgagcttagatgcagccagaggtgaacttgtaaatgaaaaaacacttgtcaagagaacaatctactggaattacccggacagccgcccagcagtgacgtggatcaatcacaatacagtgaaaatcggcaatcagactttacatcttgatactgatgaaacgtatgattggcgaaaagatgatcattggatccgtgaagaaccgccgcaggcgtcagtgaggtgatgaaacatgaataagatgaacggaacaaatgatgaaaagcatttcaatcattttgtgattgctttatcctttatatacggtttgactgaactaggctatttgttgctgaaggattttataacaattgccataagtttgcctctgtagaaaaacgcagcgtagtcgatacgccgcgttttttctttttcccttcctcttcttattgataattacaggtcatataatgtgacaaatcgattgtagaaatagttcgattagaccaaaatcctttttatacatgtattcgaatttgaagtgagggggaagcttgatggcagattttgttgctagtttgaatgcggtcttatggagtacgcccgtcatttatattttattgggaattggattcgccttttcaattatgacccgttttttacaagtccgacatttaaaagaaatgattgttcagatgttcaaaggcaagagctctgaagccggcgtttcatctttccaagcgttatcgattgcgctgtccggccgtgtgggcacaggaaacatcgcgggagtggcgacagcaattgcattcggcggacccggtgcagtgttctggatgtgggcgattgcctttatcggggcggcgagtgcctttgtagaatcaacgcttgctcaaatttacaaagtgaaacaagacggtcaatatcggggcggccctgcttattatatagaaaaaggcttaggcattaagtggtttgccgtcttatttgccgctgctgcccttattgcaatggcctttctaatgccgggcgtacagtccaactccattgcggctgggatccaaaatgcattcggcatctctcctttcgtcacagggtgcggtctggttttattattagggttcattatttttggcggcgtcaaacgaattgccaatgcggcgcaaatgattgttccatttatggccattggatatatcctgctgtctttgattattattgtcatgaatgtgtctgaattgcctgctgtgatctcattaatattcaaaagcgccttcgcattggattccgcttttggcggcttgatcggtatggcgatttcctggggcgttaaacgtggcatttactcaaacgaagccggccagggaacaggcccgcatccggcagctgctgcagaggtttctcatccggtcaagcagggactggttcaggcattttctgtttatattgacaccttgtttgtatgttccgctacagctttcatgatcttgtttaccggcatgtacaatacccaggctgcagatggttcctttatcgttcaccagcttaaaggcgtagaagcaggacctggtttcacacaagcggcaattgacagtgttcttcccggattcggtgcaggctttgttgccatcgctttattcttcttcgcttttacaacaattatggcgtattactacatcgcagaaacaaatatcgcctatttagcacgaggcagagaaagcaaatgggcgatgcttggcttaaaactgattattttagccgccacgttctatggtactgtgaaaacagcttcacttgcttgggcattaggggatgcagggcttggcattatggtatggctgaacgtcattgccattgtgctgcttgccaagccggcgctccttgctttaaaggattatgagcgccaaaagaagcagggcttagacccgatctttgatccaaaagcgctgggtatcaaaaacgctgatttctgggagaaagaatacactcatgaaagtgaacgtgtctcctgaacatactaaaaccggcccgatatgacctcgtgccggttttttatgaacgatagtttgtatacacttcttgaacatcatcgtcatcttcaaggacgtctattaatgtttccagcttctcaacagcctgatcatcggcttctgcataggtattgggaagcatggtcacctccgccgaagaaattagatatttcgattcgagggctgttttcacctcttcaaaatgctcaggctctgtgaaaacctcatataggtcttcttcaattcgcagctcttctcctcctgcttcaagcacatcaagcatgagctcatcttcttctatttgccgttcagtacggtctatcgtaatgaacccctttcgttcaaataaaaaggctacacatccgctttctcccagacttccgccatttttattaaaggctgtccgcacatttgacgccgttcggtttttattatctgttacgcattcaaccatgacggcaatccctgaagggccgtagccttcataggtgatttcttcatagctgcttccgtcttggcctcccgcagcttttttaatggcccgatctatattttcattcggcatattggcgccttttgctttttcgatgacaagacgcaatgctgaatttgcttctggatccgctccgccttctttcgctgccacatagatttcttttgccagcttcataaatattttcccgcgctttgcatcctgtgcattttttcttttttgaatgtttttccacttggaatggcctgccatgttttcaccttcttttacattttctatgtacactttaatgggaaatgttcgctgatgcaaagaaaaaggctgccgaatatcacttccggcagcccttccttcctagcggttgttcattttatgaagttttctgaacagccctttatctgttgatacttggacgtcacggccatttgcatagttgcgcgctgcttttacaacattatctctgtcagactttgtgaactctctgtggcttttgactgcgataactactcggtcatccgataccataacttgtgtgtcattgacgtttttcacttgtttcacacggttggcaatttttgcagccagtcttctgttttcttggttgtcatacccgttgttcgctgcattccgattcatgtttcggttattcgtgttgttatatgttccgtcagttgccaaaggaacacgatcgtcagcagtaacacggtcacggttatttacattcgtggtgtttcggttaccgtcgttctgatcctccattaattcagaaacaggaccatcgtggtcgattccgtctccctgtctatcggcgtcattttcatttgtataatatccgattggacgggtattgccgttattgcgcgtatcattcatagcattatcgtttgctccgcatgctgttaagccggctgtcattagaatcaggctagcgatcgtcatttttttacccaatggaaaaaccccccgtggacgaattgagcatgtttgctcgcttttatcatgtgcgtatggggggcatgttaagcgtgtcagttctctccatttggcagtgatctgcttgaaaacaaaaaaaggaacgatttacatcgttccgaacgatcactcattttcttcttccggacggccaaacatttggtttacagaaggctggttcgtcattggcatagaaactcctgccgaatatgggtttggatttgggttagctgtgccatatggcatattagggcttccataagctcccattcccgaatggccaggtgcagagaaatatggctgatgatcaccgtcacagccgcagtcgtcatgatctttgtatggcatgtaaccatgagccgcagcaggctggtatgctcccattacttggggagtgccgtaataagggccatacggcatatgtccatacggagatccataagccggagatgcgtattgcggcgcaccgtatgaaccgtaatgtccgtgatggctgttttcatgatgctggttttcataacccgggtcatactgaggcgatacaaagcctggctggtatccatgcatcggatgcattggataagcttgtgccggatagtacggatagcataatcctgatcctggaagaattggcgaaacaggcaccggacacggtacgaaatgagccggataatgataataaggctgaacagccggcatcggcatattcggaactgtgtgatgaacgttttcctcttctataccgcctacctctggcgcctttggcatattaggcatattcggataatttgcattttccatattactcatagcctcctgttgtggaaattggtcttgcatatgatacatatgatccatatttccgtcatgatgttttttcggctcctccggtttaggaggcgaccaaggctggaaaagctgtttcatatcataataatcgttcacatcagcttcagggtacacattttcctgcaaattaggcatcggcgggacatacggcatggacttcttttctttcggctttgtgtcttctacatcgacaacggatttaggcttctctttcgcatatggatgttcttgcttcacactcccggccgcaggacttttgcccgcttttggctcttttctgaccgggactccttctgacggcacttttattttcattccaggcatgattaagtctggattgctaagctgtgtattgagttttttcacttcctcaacatcgactccgtacttttcagctattttccagagcgaatcgcctttttgaacgatatggattttcaacgttttcccctcctatgcaaaacgtgaacagttcagctgtgattacaatatgtttcttcacaacatatgcctgaacaaaagaagttatgagtaaaggaagggaaaatatttctgatctacgtgatcgaaagcattcgattcagggcaaggagtgcatcttcctgaatggcttttggcaccttgatgacgcctgaaggttctcctttttcaatttgttccagcgaccacaacaaatgcggcaaatcaattcggttcattgtcaggcaagggcacatgtcagggttgagtgattcgatttgtttatctggatgctcgtgaatgatccgctgaacaagattcatttctgtcccgattgcccacttgcttcccgccggagcctggttgattgtgtcgataatatatttcgttgatccgttatcatcgcttagtgtcacgacttcgtgtgaacattccgggtgcacaatgatctgaatgtcggggtctcgctctctcatatcatggatatttttagtggtgaatttctcgtgaacagagcaatgccctttccacaaaatcactttcacattcgtatgcccggattcagctactaattcatctttcatcggatcccacacagccatatcttcaagcgcaatgcccagatcataagccgtatttctccctaaatgctgatcaggcaaaaataaaattctttttttctgtgtaaacgcccattcaagcacttttttcgcattcgaagaagttacagttgctccgccatgctttccgacgaatgccttgatctccgcagtggagttcacataagttaaaggtatgatcgtatctccaaatatatgctgaagcttcttccatgccctattggtctgctgcatgtcagccatgtcagccatagaacatccagctctcatatctggcaggacgaccgtttgctgctcgcttgtcagcatatcggcggtttctgccataaagtgaacgccgcaaaatacgatataatccgcttctttgtttttttccgctacttgggccaattgcagggagtcgcctgtttggtcagcaaattgtatcacttcatccttttgataatgatggcctggtataaagagcctgctgccgaactttttcttaatggcggcaacgcgcgtttccatatcctttctcgatagttctttataactttcgggcatcatatcattcgattgtttgatcacatcaagaattgacataacagcattcctccacagattcatttgataacgtaacatccatgctgatatctaaacttttgacggaatgagtcagaaatcctaatgaaatataattcacacccgtccctttaaaagcaggcaaagattctaacgtaatcccgccagaggcttcagtttttatattagccggtgtgagctttgcaaaatgacggaccgtatcaggcggacagttgtcaaacataataacatccgctccagctgcaattgcttcccgcagctgttcctccgtttcaatttccacctcgatatttaccatgtgccctgcggcctgacgggcttttttgcacgcctctaaaatagagccgcatgctgcgatatgattatctttaatcatgatgccgtcatacaaaccgaatcgatgattatacccgccgccggctctgacagcatatttctccagcattctgagccccggtgttgtttttctcgtgtcacaaattttaatctgttcatcatccagacaccgaacagcctctcttgtcattgtcgcaattcctgacagcctctgaataagatttaatacgacccgctctcctgaaaggagcgcagctgcgggaccgtgtaactcggcaatcacttcacctttatgcaacatgtccccatcttttttgtgtaaaatgctttgaacattttcgtccaataacgaaaagccttcttttatgatcgctgctcctgcaaaaataccctctgactttgcaacaatctccgcttcacagctctgttctccaaaaatagactgcgatgtaagatcccctgtcccaatatcctcaagaaaaaagtgattcagtaattttttcagctgtaaatgattcattgttccaaatcccctcgttttttctgatcttcgttcctttttttgtatggacaatttgtcttccttgccagctcacctcagcatgaggaaaatcggtgcggaagtgagcccctctgctttcctcccgcaaaagcgcagaaaacgtcatcagctttgcagtttgccatagatgagaaagttccatctgccgaattgtgatatccttcacatttacttcctgaaaaggcagcgtatgaagccagatgctaagctcaatcaaactgctttgttcccgcagaatagacatgtggcttgtcattttgctttgcagttcatgcccctctatatccggcacctcgtagaagacactggtttctagccctgattgatattgcctgttataaaccggtttttggataatatgctctgctgccctttttccaaataccagcgcttccaataaagaattgcttgcaagccggtttgctccatgtaaaccggagcatgctgtctcgccaatcgcataaagccccggcactgtcgtttctccccagcgattaactgaaacacctcccattaagaaatgcattcccggagcaacaggaatttttccgctgtggatatcaatccctgctttttcacaaatagcggtgatggtagggaaacgcgtttcaaaatcagaaatcgcactgaagtctatataaacgcgatttccttttgccatttcttcgtgaataacccgtgagacaatatctcttggagccaggtcacctaaaggatgccgttcagccataatcctgcggccgttttcgtctactaaacatccgccttcccctctgacagcttctgaaacaagcccgtaggaaacaccatttttcacaagcagtgtcgggtgaaactgagtaaactccaaatccgttaattccgccccggcccggtaagccagagaaagaccgtcacctgtgacagtgagatcattcgtatggtgaagaaacaggtttccacagccgccggcagccagcacaacttcgtctgcgtgccttaccttgagccgccctttgctgtcttttgtcatgacgccgatacatcgtccgtcctctataagcaaatctgctgccgtttcattctcgattaacttgattttgctgttgatccgtttgagcaaataatcgataagcagcctgcctgttgcgtctccgcctgcatgaaatatgcggttgtatgagtgggccccttctcttccaagacaaacaccgcctcgttcattgcggtcgaatggaaatccacgctccaataggctttgaaccatcatttttccatcatgtaatacgtctgctacaatagctagattattatggccgcaccctgcgtataacgtatcctccagatgggcttcaatcgagtcatcttttgcataggccgcagcaatcccgccttgtgcatagacagaattgctgtttttgacgcttttttttgtgataacagtcacttcgtatgagggcgggaaagctgcagctaaggaaagtgccgccgcccctgaaccgatgactgcaatcgtctttttagacatatgccatcctcctgttgtttacacctgtcttgacacctatatttacacaaggataaaataaactcaagagttttttatggagaacggatggaggaagaccggatgatttatttagattatgcagcgacaacgcctatttgtgaggaagcccttactgtatatcagaagcttagtatggatatgtacggaaatgccagcagcctgcatgatgcaggaggaaaagcaaagcacatactggagtactgccgtgaaaaaatcgccaacatcattggcggagaagcaagcggcatctattttacaagcggcggcactgaatccaattttctggccattcaatcattgttaaacggcctgccaaaaacgaaaagacattttattacgactgccatggagcatcagtccattcataattgcgctgcttttttggaacagcagggatatgatgtaacagtcattgaaccgaatgaatacgggcttattaccgaggaaatattactaacccatatccggccggaaacaggccttgtatctattcagcatgcaaattctgaaaccgggatcattcagcccattcaacacctgtcttcatacctgcacaataaggggattcttcttcattgcgacgctgttcaaacgtttggaaagatcccgatcaatacaaaaaatctgggagtagatgcactctcaatgtccagccataaaatccacggtcctaaaggagtaggggcggtctatatccggccggatgtcccttggaaacccgtttatcctctgactactcacgaatacggattcagagccggcaccgtaaatgttcccgggatcggtgccttcactgccgctgcagaattgatcgtaagcgaaatggaaaaacagatatcccgcaatgaggcattaagaacatactttctagaccaaatccgtattcggtctctccctgtaacccttgcagcagacacttcgaaagcagaatgtcttccgcatattatagggtgtttttttcactcatttgaaggacaatatgttatgttagaatgtaatcggagtaatatttgcatttcaaccggcagcgcttgttctgcaggttaccacggtccgtctgaaacaatgaaagcattaagaaaaaccgaacaagaagctctgcaatttatccgcatctcttttggcaggcatacaacagctgaacagctggaacagttattacatacgtttacagtgctttgggaacaaaagaaaggagaatttgatattgaccgaagaattaaagctaatgggcgccaacaggcgtgaccagcttcttctgtggctgaaggaatctaaatcaccgctgacaggaggagaactcgcaaaaaaagcgaacgtctcaagacaggttattgtacaggatatatcgctcttgaaagcgaaaaatgtaccgattatcgccacaagccaaggatatgtatacatggatgcagccgctcagcagcaccagcaggcagaaagaatcatagcatgtctgcacggtcctgaacggacagaagaggaactgcagctcatcgtcgacgaaggcgttacagtaaaagacgtaaaaatcgagcatcccgtatacggagatttaactgcagccatccaagtaggcacccggaaagaagttagccatttcatcaaaaaaatcaattctacgaatgctgcctacttatcacagctgaccgacggcgtgcacctgcatacactgacagcacctgatgaacatcgcatcgatcaagcctgccaagccctcgaagaagccggcattttaattaaagactaaaaaaagccctctagtgggctttttttataattggtaagactggtatgcacccagaagcctcactttgcagccgagtgcttcaagctcctgcatggcccctggaatcaatacatcatcaaacgctttctcaatatcaataataaagaaataatggcctaatccggttttagtcggacgtgactcaatttttgacaggtttaaatttctccaagaaaatgcagacagcactctatgcagcgccccggactgatcatcctgcggcagcatgaccattaaggtcgttttgggcctagagctcaattttgaattcacttcaaaagatatgttttcatcgggagacaggataacaaatcttgtatgattgtccctataatcctgtatatcccgtttcacgatttttaattcgtatgtagaagctgccatatcattggcaatgaccccgatattcagctcgggatggtcactgacaaactttgctgccgccccggtagaattggcgtattcatatggaacggaaggaaaatgtcgatgaagaaatttatggcattgcgcaatcgcgtgtgaatgtgagtaaattttgtcgagctctttccatgcattctctcttgagggatggacgagcaagtgctggtgaatcggcaacgtcatttcacccacgattggcaaaggctgttcatgtattaaatagtctattgttagattaacagatccttctaaagcattttccaaaggaacaaaagcaaaatcaacttcgcctgcaacggctgcatctatacactccggaatggtgcggtaagcaacatgttcggcgccgttttgaaaacaagaactgactgctagatgtgtaaatgtagctgctggacctaaataaccgactttcatgacgattttctctcccttatgcacctgaacctaatatttcaaccttttctacaaaatcaaacttcctgagcttattcattaatgtatgaatgtcttcttccattgccgacgtactgatagacagtgtcacatttgctctgccttgaagcggaatggtctggtgaatggaaagaacgttgcttccagaatcagctaccgcctgaagaagctgagataacgcacctgacctatcctccaaatgaaagaaaagtgtgataatttgttcttttaccatggtgtagaatggaaaaacagcatccctgtatttataaaacgcacttctacttaaatcgaccttttgaacggcatctgctactgaatctgctttttttcgatcaagcagctttttgacttctaatgtttttctcattgcatcgggcaatacatcttcacggacaagataaaatgtctcctctttcatttgcatcccccctttaaaatagagagcctggcaccaggctctcttttcagccaacattgattaatcaataaattcaaattcaaattccagaagcctgattatatctccatccttggctccgcgttctctgagtgcttcatcaacacccattccgcgcatctgtcttgcaaaccgtttaaccgattcatcacgtgagaaatcagtcatcttgaataaccgctcaaggctgtctcctgaaagcacaaatacaccgtctggatcgcgtgtaatgttaaatggcacttcttcattttccatcgtgtacatgacacggttttgtgtaagctcttcctcgtcatacagcgggaattccggtgtgttctcaagctgattggcaacctcaaacagaagctcacgcagaccttctcttgtcaccgcactgatcgggaataccggataatcatccgtcagcttttctttaaaggcttcgagattttccgcagcctccggcatgtccattttatttgcaacgataatttgcggacgctcagtgagacgcagattgtactcgctcagctcctggttaatcgtaagataatcatcatatggatcacggccttctaagcctgacatgtcaatgacatgaacaataaccctcgtccgttcaatatggcgcaaaaactggtggcccagtccgacgccttggtgtgcgccttcaatcagccctggcaaatcagccatgacaaagctgcgtccgtcatccgtttcaaccatgccgagattcgggacaagcgttgtaaagtgatagtccgcaattttcggttttgcagatgagacaacagacagcaaagtagattttcccacactcgggaacccgacaagtccgacatctgcaagcacttttaattcaagaacaatgtagcgttcttttcccggctcgccgttttctgaaagctgaggcgcgggattagccggtgtagcaaagcggctatttcctcttccgcctcttccgcctcttgcaatgacagcccgctgtccgtgctctgttaaatcagcgatgacctgttttgtatcatcgtctgtcacaacggtgcccggcggaactttaatgaccatatcatcagcatttcgcccgtgctggtttttggacatgccatgctcgccgcgaatcgctttaaagtgttttttgtatctaaaatccatcagggtgcggagaccttcatctacttcaaaaacgacgtctcctccctttcctccgtcaccgccggcagggccgcctttcggcacatatttttcacggcgaaacgcaaccataccgttgccgccgtcgccgccttttacatatactttgacctgatctacaaacataatgtcctccgttctaaaccgttaaaaactccgctagtccaacccaatttcaatcagacattcgtgactcgtgatttcaaaacgcatgatatcaacgtcctcatatccattctgccgaatatcatcaaaagcagatggatcggcaaaggcgccgtgaaaatcaaggtacagaatcagctgtctgtcaggatgatccgtttgaagcgaaaccgttaaatgattttcactctctctgctgactgcttgatcaaacagatgaaacagctttctcatcagtttcgccagcttttgatcataagccgacaaatccttaatttctccgagaacttcatattcaagcgtcatataatgggttttccaattaaacgtaagaaaatcaaacgccaaatgcggtgttttcaggtttgagagctttgattcgtgctttgcgtctataaccatttcttcaatcatttcaaagacacggtcatacttctgtaagcttaagtttcctttaatcagctgcagcttattcatccaatcatgccgggaatggccaagcagatgaatcagttcgtttgttaatgccgtgtcgcttatattttcttcttgattttttgaaacatccttcattttcgcactcccaatcatttaatttcttatttaggagtctgtataagtgtgtattatgaattataacagagaaggctttgttagaaaaacaattgtttttcccagaaatatcatgttccttttttctggctttggttgatttgcagccaggcagaacattttatgtattactgcttggggaacatatccagtgggtttgagatgtttattctcattcttggcggggtctgctcgcacatactctgcatttcattctaggtgtttactccgcatattgcaaaaaaaactccagtcatcatcgaccggagttttttgaatcattattgagctacaggatatacgctcacttttttgcggtcacggccgaaacgttcgaatttaacagttccgtcgattttcgcaaatagagtgtcatctccgccgcggcccacgttttcacctgggtaaatttttgttccgcgttgacggtaaaggatagaaccgcctgttacgaattgaccgtcagcacgtttagcacctaaacgtttagcctcagagtcacgtccgttctttgtagaacctactccttttttagaagcgaaaaactgaagatctaatctaagcatgtagctcacctcctatattatgtttgtggtcacacgcaagttgtctttgtaatcccgttcgattgtctccagcgaaacaatcatgccttcaatcagcagctgagctttttggcgtgcctctggatcaagagattcagggaattcaaaataaaaataacccccgtcctctcctatatcaagaagcggctcgaagcccgcgagcacaatgaccgcgttaacggccccaaacacaacggctgtcactccggcacaaacaagatcttgtccatgttcagcaaaattcgcatggcccgtcatttcaaaagacaatatgcctttatcatgagaccttctgattgttgcctgaatcatgcttacgcgttgattttttcgatcgtcactttagtgtaaggctgacgatgaccttgttttttatgaacgtttttctttggtttgtatctgaaaacagtgatttttttcgcgcggccttgtttttcaactttagccgttactgttgcgccttcaactgtagggttgccgactttcacgttgtctccgccaacaaacaaaacgtcttcaaaagtaactgtttcacctgcttcagcagcaagtttttcgatgtaaacagtttggccttcttcaactttgatttgtttaccgcctgttttaatgattgcgtacattctctgcacctcctattagactaagactcgccagataccagggggctgtaaaagctcttaacacctgtactgagcggttgtagcaatggtgctacatccataacattaaaaaatataccaaaatacaaggcgtttgtcaatcagttttagtagggcagaagcagttcctccatggaagaattcgtccgcttatcggcaaagtaagcgtgcagcacttcattctcgtcaagctggctgagcttttggcctgatttttctataataatcggatgcttacagccacgtttgaactcggccatcacatgatagactttatcctccgcctttactgtcagcggcagaagtttctcaagctccctgttttttccgtaatacctttcgaggagaaatctcacatggatatagtgcctttgccgatattcctcaaacaaggaaacagccagaaagacaaacaaaacccatgcgctgatttgcagaggaatcacgaataaaacccagcacccgagcagcaggcagaagcagagcgacgtttttagattaagccggtgagccttttgaaaaggcagctgtttggaaaacaacaaaaataacagttttcctccatccagcggccagatcggcagtaaattgacaaataagatagaaagattataaaaggtgaagagttcaaaggtatgctgatgaatcactgagacttctgcaagcatccaggcggcaaactgaagccagatgtgctgaagaggtccggcaataatgaccgcaaactcttcctttaacggccgattcccgtgctcttccacttcgaccgttccgccaaacggcagcaaaaaaacacgcttgattctccaagaaaaaaacacagccagagcagcatgccccagctcatgaatcaatacaatcaggagcagacataataatgctttcatatggcctgtgagcaagcccagcgccgcaataatccaaagaaaaggatgcacatggatctttaagataaggtcgagccatttattcaaatgaaatcacctgaatcggatcaataaatttatcgccgtctttcatggcaaaataatagacccctttattatgatcatcaagcttaatcgaaccgagctttttgcctttatccacaaaatcatataaagcaacatccacatctttgagctcgccatagatactataggtgttgtcagcatgctgcaccttaaccgtcagtcccgtttggctgtctttgctgacttcaaccacatagccttcttttacgctatcaatcttatcactgcttgtttcgactttaattccttccccattgtcctgaaaatcctgctgtactttcccggatgcaggcgcgatcagatctttgcctacttcaatctgctgttccttatttttgtgttcaggagccaggaaagcaagcggatttccgaatttggtttcgaaccaatggcttgctgaagcaaattgaaattcagtttcaaaggttttggctacggcgggtttaatctgactgacgggtccaatgtttgttttataggctatagctgaaacgagaacaaggcaggccgacagaagacatttcaggataattgaatctgttttcaccaatgggtgttttccgttgaatgttggcatgttatcttcgtagaccggaagtgttccatgcttttcctgatccgttaccatcacccaggacgggggtttctgcttttcagaaactgtctgagtagagaaacgttttgagccggaaagctgctttcttcttttctctaatcgttttctgatttcatctgctctgtgactcattgccatcatcctttgcattcgttgggtttgtacatcatatgtcttgtccatggcaaatattcggtttagtcaagaacaaagcaggcaaaaacaaaaaaaacctgacacagcatatgctttgtcagattcttctctttgattctatcacattaagatcttactccgaaaaatgacttaatcttagccatcattcctttgttttgctcttcaagcacctgtaaaggaacagattcacctaagatgcggcgggcaatattgcgatatgcaatggaagcgcggtttttagggtccatcgcaatcggttcgccatgattggaagctttaatgacttcatcatcatcagccacgattccgagcaaatcgatcgacagatgctgtacgatttcgtcgatatccatcgtgtcaccgtttttcatcaggtgatttctgattctgttaacaacgagccgcggcggttcaatattttcctcttgctccagcagtcctataatacggtcagcatcacgaacagctgagatttcaggcgtagtgaccacaatcgctttatcagctccggaaacggcatttttgtacccttgctcgattccggcaggacagtctatgatgacatagtcaaattcctgtttgagctcttggaccatgtttttaatttgttcaggagcaacagctgtcttatcgctcgtttgagcagcgggcattaaatagagcagatcatcgaaacgtttgtcttttacgagcgcctgatgcattttgcatctgccctctacaacgtctaccagatcgtaaataattctattttcaagacccattacaacatcaaggttgcgcagtcctatatcagtatctactaagcatacgcgcttccctaaaatggctaaggcggtaccgaggttcgcagatgttgttgtcttacctactccgccttttcccgaagttattacgatagcctcacccaattcacattcctccctcaagccttgttagatcaggtcttaaatgagccaaatgttgaaggcgttcaatgaccatatttccgtctgtatctaaataagcacattccatttcgttccctttttgaatgtggtctggggagcgatttaacacatgattgattcttaattgtgtcggaagcatttcagaggcggcgatgaccgcttgattatttccattgaatccagcatgcgcaattcctttcagtgagcccagaacaaaaatgttccctccggccctgactgttccgccgggattcacgtcaccgatcaggagcaagtcgccttttacctgcagcacttggcctgaacggacaatttttgaaacagaaataatttcggcttcctctcttatctgctgtgcttcttttttagtaatgacttcactgtcaatagaatgaacaaacaaatctttctttgacgcaatcaattcggttagctgttcctcttgctccttatataaaaagcgatttcccagcttaacatgaacgctgattttctggccttttccatcggtatattgttcaattgacagcatattctgaagaccatcgagaagctcatcaaaagaacacgcatcatccagatgcaatgttagtccattctttgttccttttattgttacatattgctgctttttggtcttcacaatattcacctcaacaacatactcatttcgtcaaaaaaagataaaatcctttttactcatctctcaattctttctttagactcataaaaaacaatctaaatggcagaacaagaataagagctgctgcaatatttaataaaattgtcggtataaaccggtcaagcacaaatccgttaaacgtcataatgtctttatgaatcaaagactgaatgccgaatacgtaaaattcgagcagacagacagccagaactgctatcaatatcactacaaatgcgtttgtatgcaacactttaaacgcttttgaagccaaatagcatagccctgcaaaaccaaacatgtaaacgcctaatagacttgtatagttcatgtcatatagaaagccaaaaataaatccgtaaatcatcgcgtgtttttggttgataaaagccgacatgaatatcaatacaagcatcaaaaaacgcggggcgagcacttggtcatctgtaacgaaaggaaaatgcaccaaatctgtaaaaatgctttccgcagaaaaaacaagcatcataacgaaagggagaaggaaacgtttcacgatccttcctcctctgtatcgacagtcggcacgtcacggttaacaacgatcacattatttaaatctgtaaggtcagccgcaggttttacataagcaaccttcgttaatccataggaatctgactcgatatcagtcacttcaccgattgtcagcccttctgggaaaacaccgcctgtccctgatgtttcaataagatcgccttttttcacgtcttgtttatccttacgctcaataattgtcatcttaagacgttttttctctttgtcatatccttcgatcaagccgtagcctttgctgcctttttttccggaaatttttgtcgcgactctgttattgcggtcagtatcgcttaaaagctgaacagcagacgtaaaattgttaagtccggagcttttgatcttgccgattaatgcgcctttttcgtttgtaacggccatatctttcgctacgttttgctgagtccccttgttaatggtgacctgtttcgcccaattatcagggcttctggcgatgaccgttgctaaaatcggcttgtaatctttaatcgatttgacatggccaagctcgtcacgcaaggatttgttttcttcttcaagctcttgaagcttggcttcatattgtgtctgtccgtcaagtttttctcttagacgctcgttttctttgtatgtgttttttaaatcattgatgttctcaaatattcctgcaaaaaattcggcaggcgtatgaaaaatattttgaaatactcccgtcgtatcgccgatcactttctcaggccaggtggtattgcggccgcccttcagcgaaaatccaatcatagccaccaatatgataatacacagaagtaatagcattaaccgcttattcggcatcgtgttacacctcttctattgaactcccgattatctagttttccctttgaaaagatggatgtgctccagtgctttccctgttccgatcgctacacaatcaagcggatcttcggcgataaggaccggcatttttgtttcttcgctgatgactttgtccaaattgcgcaaaagcgctccgccgccggttaacactatacctctgtccatgatatctgctgcaagctcaggcggtgttttttcgagtgtgctcttcactgcttcgacaattgtagatacagtgtcgcgtagagcgttagaaatctcttttcctgtaatttcaattgttttcggcaaacctgtgagcaaatcgcggccgcggatttccatgttgtcggattcttcaggagcttctgcagatccgatttccattttaatcgcttcagccgtacggtcaccgatcatcagattgtacgtttttctgatgtagttgataatcgcgtcatccatctcatcaccggctacacggattgactgagacgttacgatgcctccgagggaaataatcgcaacttctgtcgtaccgcccccgatatcaacaaccatgcttccagtcggttcccaaactggcagattggctccgattgctgcggcaaaaggctcttcaatcggatacgcgtcacgcgctcccgcctgtcttgtcgcatcgataacagcgcgttcttcaacagctgtaatgcctgatgggacacataccattacatatggttttctggcaaacatgcctttattttttatggcctgattgatgtaatatttcatcatcgtcgccgttgtttcataatcagcgataacgccgtctttcatcgggcgaagagccaccacgttgcccggtgtccgtccaatcatatttttcgcatcatttccgacagcgacaatcgatttcgtatccgtctgcaaagcgacaactgacggctctctcacaacaattccttttccttttacaaaaacaagcgtattcgcagttccaagatctataccaaggtctctagcaccaattccaaacatatgtatgtatcttcctttcttaaagcaaaaataccctaaagggaaaaactcataaactctattatagcttaattcgacgaaaaaaaaagtgttacaaatatcctttttcctttaaactcacaaattttttatccccgatcaccaaatggtcaagcagctcgatgccaatcaggtttccgcattcaaacagccgtcttgtcacttcaatatcttccctgctcggcgtcggatctccagaaggatgattatgaacacagataaaggaagcggcagatcgtttaaacgcttctttaaacacctctcgcgggtggacaatagatgaattcaggcttccgataaatacggtgcgtttatggatgacttgattttttgtatttaagtataaacagacaaaatgctcctgggttaaaaagcgcatatcctccatgacaagattagcgccgtcttccggggagcgaataacgaaatgttcttcgttggctaatttatgaatccggcttccaagctcaactgctgccagtatttgaatcgcttttaccataccgattcccgggatgcttgacagctcttcaaccgatgcttccttgagcaggcgcagcccgtcaaatgagcgcagcagccggtttgacaggtccaaaacagattcgtgtttagtccctgtccgcaataatatagccaaaagttcatgattcgctaagttctcggctccgactttcaggagccgttcccttggcttttctttcattgggaaatctttgagttttaatggcagatcgtgtatgaccaagcactccttttctttcccttcccgtttatagaaccgtcatgcccttatatcaaaatggcgaagagctctcattgtttttgatataggaaggcccatgactgaataataatctccgtctattttctttacaaaaagcgcgcctcttccttggatgccgtatgcacctgctttatccatcggctcttttgtttcaatatatgtccaaatctcttcttcactgagggaccaaaacgcaacttctgtcttatcataaaaagtctcgctgtgattttcagcttgaatgctgaccgcggttattactgagtgacttcggcctgaaagcctccgcagcatagaagcagcttcttcttgatcctgcggtttgccaagacattcgccgtcaaggcataccattgtatcagcaccgataacgattgcatgcgggtggagatcagctacagccttagctttttgttttgccaaccattggacgttttcttctggtgaaaagtttcgatttaatttttcttctacttcactgacaataatggagtagggcagctggagaagatcgaggagttctttcctgcgcggagattgtgatgcaagtattagcggttttgtcatgttcgtcatcctttcagggtttgcttaagaaaaaaagatactcgtttatcctaccaaatcacgaggcttgtcacaatttcagaaaaataactttttcatgacaaaataaaaaaagcctgtcactaaaggacgaaggctcagggcactatctcttattttacgacggctaacagctcctgctgagccttccacccggcttcagcacttggatcctctaattcctttaaagcctgcaaaatcgcttttttctctcctgtttctgacgcttttgtttcaccaagcgacttttctattttctctacactcgcttttgtaatgtcttcgtcgagaatcgcctttgctgcaagctccgctgtttccttaaaagaatctgtcatatctgactctattgataaggaaagctccttgcctccccaggcttcaaaatcactgtcgattaaaacctgtcctaactgctgtgagacctccttttcacttgctaagcctgcaataacatacgtatacccgtcatcctttgacagtgacacggcggaatatcctttttcggtcaattgttctgttaacgtttcggcgcccttttcatttgaaaattttccggcttgcacagcgtatgttttgtatgtaccttcagtttgtgccgcttgtttttctgcgcctgaggtttgtttatcagcagaagtatcccctgcttttgccgtttggctgcctaaagaatcctctaaagaggccggtgctgacgcttctttattccccgatatgtttaacgcgaataaccctaatccagtgccaatgacagccgcgaaggcaatcgtcgcggccactctttttaccggtttggcagccccggtctttccttttgcgtaaagctttgtttttttcttttgaaaaggaggaacaactttagggtcctctttaaacaccttgtcctcctcggaatcccaattgaattcatcttcatcagggtgttcctgggatgccgcaacctcttgttctgcctgtcttttttcctcccaatttgaaaatgtcatgcttttattcgcctctgtctcaggcgtctcttgttcgtaaaccgtctcttcttttccattaatcgtcaccttgagggctttttctgcggctttactgttttttttattctttctttttttcaattccgcttcctcccttcatttgcttgaccgttcttgtcggcttttcatgctacacactttagcacaggcaaagaaaaaaagaacaagacttttgtcgccttgtccaaaaaacgttcgtcaaatttttcagcagtcagcccaatgccattttgatataaaaagaaatgatagagtcaccgtataaataggctaaaatgctccctgcggctatagcgggggcgaagggaagcggctgccttttagcgagtctaccagtcagaacagctgccgctccatataatgcacctatcaaaactgaaaagaaaaaggcagctgccagcattttcacaccaagcacaaagccaatcaccgcaaataatttaatatctcctccccctactcccccatgggtgattgcggcaattacagccagaaacaaaaatccggctgccgcacctaacaggcctgcataccaggaatcaagcggagaaatcaatctcgcggccgccaaaaagggaagaaagaaaatcaatattcgatttggaatcagcataaaatgaatatctgtcactgcaacaataatgagaagagagataaacaccacagcgggaaacagttccagcgatatgccaaagcgtattcctgcggcggcaaataaacacgctgtcacaagctctgctgcgggatacataaaagaaatcctatgcccgcagcttttacatttacctttttgaaataggaatgacaggatgggaattaattctgcaggagttaatgttcgccggcaaaacgggcatgatgaacggggcgcaataatagatagatgtaaggggatacggcacccggccgtatagtaaaaagaaccaaggataagcccgaagataaaaagaatggatagcatagacaacacacctttactcattgagttctggtatggattgtagcaaaatggacatcctgagctccaattgggaatattcaattttacacatgaaaaaaacggcagaatctttttttgattctgccggagccggatgcttttatttcaacctttttcgaatgtcagaaataaagtaaagagatccggtaatcagcacaatttcatttgagccctttttactttctatgaatttgattacatcgtctggatcttcactccagcttttattgctgatttcacttgcatcatagagatcttttgcaagggaagcacgcgggaaatcaaaagaagcaaaatgaatcgcatgagcaatggtttccagtcttttaatcatgttctgatacggtttgtcctttaacgcgctaaacaccacagaaatgcgtgaattggcgaaacgctgcttcatcgtttccgccagcttttcaacaccttcttcgttatgcgcaccgtctaaatataccggaggatgttcctgaacaagctctaaccgtcccggccaagcagccttcacaagcccgctccttaacgcttcgtcactgatatgggcgatattctccttattgagccactccgcagccaaaatggacaaagcagcattttgtctttgatgggtgccaatcagagatgtccgaatatcttcatagcatttctcttccgttttgaatgaaaactgttctcctgcaggcagagcctcttcattgaaaataacacatgcatcatgcaatgactggaacggcgcagcatgccgttcggcttcatggcggatgacctgtaaagcttccggctgggtaactgctgtaacgattggaataccttctttaataatgccggccttttctcctgcaatttcttcaatggtgtttcccaaaatgttcatatgatcgtgtccgatgcttgtaatcacagttaagagcggttcaaccacattagtagaatcgaatctaccgcccagacctgtttcaaaaataacaaaatcgaccttatgaaactctgcaaaatataaaaatgcacaagctgtcataatttcaaattctgtcggctgtccgtattccgtttgatcaagggcttcaacgtgcggtttcatttgattgacgagtgctgtccattcctcatctgaaatcggtatcccgtttacgctgatccgttcattaaacgtaataatataaggcgatgtaaatgttccaaccgtatatccggcttcctgcagcatagaacggataaaagcgacagttgatcctttaccgtttgttcctgcgacgtggaacgctcggatttttttttcaggatgtcctaaccgcgccatcagctgtttcattcgaccaagtccgggcttcaccccgaatttcagcctcccgtgaatccagctgcgcgcatcttgatatgcagtaaacaatgataatcccctcttttataagacaaggcggtttctctagaaaccgccccggcttttcattaacccttcagctcagccattcgtttttgaacagcgtcacgcttcgccacataatctttttctttttcacgttcttcatcaattacgtgtgcaggcgcttttttcataaatccttcatttccaagtttcttttggacacgctcaacttcttttgtcagtttatcaaattctttttgcagacgggcaatttcttcatcaatattgattaagccttcaagcggaagaataacctctgctcctgagacaacggccgtcatcgccttatcaacagcctcaatatcggtgccgattttaagcacgctcggattcgtaaagcgttcaacatatgaacggttcgcttcgaggcgggacgctatttcgtctgtgcttgttttaatgtacagttcaacctgcttgctcattggcgtattgacttcactgcggatattgcgcacagaacggatcagctcaacaagaagcttcatgtcagctgccgcttcagtatcggtatgctccggcactactgcaggccattgacttactgtaatcgattccccttggtgaggaaggtgctgccaaatttcctccgttaagaatggcataaacggatggagcagacgcatcgtttgatcaagtacgtaagcaaggatggaacgggtagttttcttagccgcttcgtcttctccataaagcggaagcttcgccatttcaatataccaatcacagaaatcatcccaaataaagttatataaatggcgtcctacttcaccaaattcatatcggtcagcaagctgggtcacgtgctcgatcgtttcatttaatcgcgttaaaatccacttgtcagcgactgacttttcacctgacagatcaagctcatcgtacgtcatgccatccatattcattaatgcaaaacgggaggcgttccaaattttattggcaaaattccaggtcgattccactttttcatagctgaagcgcagatcctggccaggagagcttccagtcgcaaggaaataacgcagagaatcggctccgtacttgtcaatcacatccatcgggtcgacaccgttgccaagagatttactcattttccggccttgctcgtcacggattaagccgtggattaaaacatctttgaacgggcgctcgcctgtaaattcaatgccttggaaaatcatgcgtgatacccagaagaaaatgatatcgtaccctgtcacgagaacatctgtcggatagtagcgtttaaagtcttcagccgttacatcaggccagcccattgtggagaaaggccatagcgcagaactgaaccatgtatccagtacgtctgtatcctgttcccaattttcgctgtcttccggcgcttcaagtccgacatatagctcgcctgtttctttatgataccaggcaggaatacgatggccccaccacaattgacgggagatacaccagtcgcggatattttccatccagtgtaaatacgttttttcgaaacggtcaggcacaaagttgaccttttcttcttttttttgcagctcaatcgctgcatcagcaagcggctgcatgcgcacaaaccattgtgtagaaagataaggctccacaacagccccgcttcgttcactatggccgacagagtgcatatgatcctcgatcttgaagagaactcccgcctcctgtaaatctttcacgagctttttgcggcattcaaaacgatccataccttgatattggagcgcattttcattcatcgtgccatcttcattcatgacaaggatgcgttctaaattgtggcggttgccaagctcgaagtcgttcggatcatgagcaggcgtaattttcacggcacctgaaccaaattccatatcaacatagtcatcaccgacaatcggaatttcacgatttacaatcggcaggatcaccgtttttccgataaggtgtttatagcgctcgtcttcagggtgaacggcaacagctgtatcaccgagcattgtttcaggacgtgtcgtcgcaatttcaattgagcctgaaccgtcagcaagcggatagctcatatgatagaatgcgccttgaacatccttgtaaatcacctcaatgtcggatagggctgtttttgtcgctgggtcccagttaataatatattcgcctctgtagatcaggcctttttcataaagcttaacgaatacttcccttaccgctttgctcaagccttcatccagcgtaaaacgttcacgggaataatctaggccaagacctaatttcgcccactggctgcgaataaagtcagcatattcttccttccacttccacgtttcttcgaggaatttttcacggcctaaatcgtagcgggatttgccttcttcacgaagtttcgcctccactttagcctgtgtcgcgatgccggcgtggtccatgccaggaagccacagcacatcatagccctgcatgcgtttcattcttgttacaatgtcttgcagcgttgtgtcccatgcgtggccaaggtgaagtctccctgttacgtttggcggcgggatgacaacagagtatggctcttttgtctggtcactgcccgcttcaaaaaatttgccttttagccaaaaatcatatcggtctttttcaaccgctgccggatcatatttcgtcggcattgtttgttcattcgtttccatcataaccctccagcatgtttaaaaatggctgagaacgaaaaaagagctcttcatccctgtaaaaggacgaaaagctctttcgcggtaccaccttttttcatgaactcaatcagttcatgcacttataacggataacgggtgtttcccgaatttctctactcttctttcaagaaattatgctcccgggcgaccttccaatcagacaacataagaagcctttcagcaaacggcttctctctctgcatgcgccttttttgtactcttcccgttctaagcaggtgtatttatcagctcattgtatacattatttatgttctttattatagtaaaagtgtttttgattcgtcaatcatcttttccaaaaacaccgctttctatacagatgggcaggcacctattgcccaagtttacatatgatgcttgtaaatgcgtagaggaggatgcaccgtgaagaaacgtttcagctcttattcgctgccgccatgggtaaggcaaattcggcttgtatccgcacaagtgattattcccattacgatttttcaaggaatcagaaccattttctttccgacaacctttgatgttttgctgctcgcaatcctaatctttttagcttgcgcccttcatttagaatggatataaacaaacaagtccgcgccattaagacgtggactcgttttcagcctgaaattttttctcttgttcaatctgatgaattttcatcacaaacggctctatgtttttcatttgccaataagcctttaataattgtgtacattcctctttttcatgctgtcttttcccagtttgataaccgttcagcaccttgtacatggctgccggatatgccatatagctgagaaaaaggctgacttccgcttcacgcaaagggaatgatttcgtatatccataaaaccattcgacgcattccggacaagctttcggaaagcctctgaacatttttgtataaaagccgagcaggtcgttttgcggcggaccgacagatgctctttcgaagtttgtaaaatatccggtcccggcatcattatacagaaaatggtgtatagacaggctgccgtggttcattacaacccttgaaacgtccttttcctttgcggactcataccagtcctccagccgttccagcgcaaagttcaccgcggaaatggtttcagaaaaataggttatggcctggagttcaaagggagaaaggtaccattccttctccgctctatccacaaactgctcatagaaaattttatcttgttcccacttttttttcgtttgcccgtaataacgttcaatctcatcacgtctaacctttagttcctgcgcggttctctcgtgaagacgggctgtttctctaaataaataagcatgtttttgatcccgttcttcctcttggtcaaattggagccaaggcattaaatagtagatatctccgtattgtatgcctgctgagaaaaactcaccgctatttgttctgtaaacgggaacgaatgaacgaaagcctttttcctcaatcgccaccatatgatctgtaaaatgcttgccgcgaccttctttcaattttttcagggcaaatatgccgtagtctgtatacactttccaaacaagaggactgacaggctcaataaattgagcagtcagtccgtattcctgaagaaccgattgggtatcttccatttcattcaccacattttccgatcacttacggtttacgcatggctatttttatattgaggaatatagagaatctgtcctgcttttaattcatcatccaaggctaaagaattcatcctgatcagctgctgggatgtaatttcataccgttcgcataaacgctcgatcgtatcttcctgctgcacaatacaaattttcattctcgaaaactcatccgcttcttttgtaaagagttttgttaaataaagagaattatcactttcctttgtttgaggttccttcgtttcagcagcaggagcaaccctaggaacagcatccgtttccttcctttcagtctcagaagattcaggcagctggaaggattgaaaaggtgtttcttccttaggctcttcagctgatggtgtttttctcacttcaatttcgaagctctcttcctcttgttcttcctcctccagcagcttaggcgctgaataaaaagaatcctcctcttcttgttcaggcaggaaggtacggtatgccggttcaggcaattcttcttgagatgcctcctccgagcttgttttttgattgaaatggaaatgtaaatcggcattgtcattctccatatatacagctgaagctgtttctctgctatcttctatggagagagcggcctctgatacactctccaaagcttcatccggttccgcctcttcttggcaaagcgcaggatcagcctgatccgattgagctgcttcttcattttgagcctcttggcgcagcgcatattcatgattaggagacactgttgtttcctctttttcctttgcaatcacagtctctgaatgaagctcagcttccaaagcaggcgattcttctgctccaacgtgttcacgaagctcagtctccgctggagagtctgcttcttcacgaacatccgctattgcagctgccggctctgccgtttctttttttgctttaacgatctcttgaatctctatttctgaaggatcaggttctggctcagattcttctgtttccgattcagcacgaacctccgtttccggcacagcaagctcttctgactcttcttcctctttcacatcttctctggcctctggttctgaagcaaccgattcaggcggctcagattctgctttttctgtctccagttcttcacggagccccgctttcgagataaaaagttctggcggttcggctggcggttcatgctgaagaactgcttcctctgccgatgatgcacccggttcttctactacactatgtgccggcggctctgaaagctcttcctccctgaatgccgcaggagcttcatataaaggtatctccggctctttgtcttgcgtatcgtccaaaagcccttcgatcgctaaatcagcttgaattgttaaaatgcgcgaatccgtcaattgatagtcaaatgcgtcaataaagacgaagacatcctgtaaatggctcactttatttttcggaatggtaatatccacaggaaaacagtgagtcagttccgcacttccatcctctctctttctgacttgttcaacaaaccgcttatctgtataaatctcttcggtatgtttgttttgatctatgttgtactcacctgtaagttcaagcgatcctatgattgatacataatcatttacttcctgaaccctaatatcaggatctaatgaaatagaaagcagttcagaaacttcctgtcctttttggaaacagatcgattcttctacagaaaattgcaatcgatgattttgcggcaagttcatatcctcctttcatctaatccttaaaattagatgtcactaaaggtgtatgtatgaactggagaaaatatgagtgggagagcacgaaaaaaccggcacaaggagtccttgataccggttttcactcttatctgcggctgatctcagcaaatactttctcagctgcctggattgtgttttcaatatcttcatcagtatgggccgttgagaggaaaagaccttcgaattgtgatggcggaaggaataccccttcatttgccatccctttataatagcttgcgaacagcttcaaatcagatgatttcgctgtttcataattgatgactggttcgtttgtaaagaagaaaccgatcatcgaacctgcacggttaaaggtatgcggaatgccatgagccccggcggtttttgaaattccttcttccagtctgtcgccttttttgatgaaattcttgtaggattcaggtgtcagctgtttcaatgtctctaagccagccgtcatcgcaagcgggttgcctgacaatgtaccagcttgatagatcggaccgcttggagcgatctgctccatgatttctgcctttccgccataagcgccgacaggaagtccgcccccgattacttttcctaaacaagtcagatcaggcgttacgccgaagtagccttgagcgcagttataatcgacccggaagccagtcatcacttcatcaaaaatcagcagggagccgtactgctcagtgatatcacgcagaccctgaaggaaaccttcttgcggcggaacaacacccatatttccggcaactggctctacaatgactcccgcaatgtcttcaccgaattgctggaaagcaagctttacactttctaaatcattgtacggaacggtgatggtgtttttcgcaatgccttcaggcacccccgggctgtcaggcagaccgagagtggcaacacctgaaccagctttaatcaagagagaatcgccgtgtccgtggtagcagccctcaaattttaaaatcttgttgcggcccgtatagccccttgccaaacggagggcactcattgtagcctctgttccggagcttaccattcgtacaatttctacagatggcacacgatcaatgacgagcttagccagttcattttctacttcagtcggagcaccaaagcttgtcccgtattcagccacttttttgaggctttctacgacgcggtcatttgtatgccctaaaattaaaggcccccatgacaagacgtagtcaatatattcattcccgtcaatatcaaagattttcgagccttttccgcgctccataaaaatcgggtccatgtctaccgatttaaatgcgcgaacgggactgttcacaccgcccggcatgagtttttgcgcttctttaaaagccgtttttgatttttcatagcttctcatctgcctcaactcctgtcaactgaataaaattactccgcaagccatttcgctgcgtctttcgcatgatacgtaataatcaggtcggcacccgcgcgcttcatgcttgtcaaaatttccaacacaatttctttttctttgatccagccgttctgcgctgcagccttcaccattgaatactctccgcttacattataagcgacgagcggcaaagtaaactcattttttacgtcacgcatgatatccatataagaaagcgaaggtttgacaatcaaaaagtccgcgccttcctcaacatctgattgtgcttcgcggagtgcctccatacggttggcagggtccatctgatatgttttgcggtctccgaattgcggtgtgctgtttgctgcatcacggaacggaccgtaaaactcacttgaatatttaacagcgtaagacatgatgggaatattgacgaatccttctttatcaagtgcttctctgatcactgtaacaaatccgtccatcatgtttgatggcgcaatgatatccgcacctgctttcgcttggctgacagctgtctgcgccaaaagctccagcgattcatcattgagaatgactccgtctttgacaagtccgcaatggccgtggtctgtatattcgcacaggcacgtgtcagcgacaacaaccatttcagggaagtgttctttaatttctgtgatggctttttggacaattccgtgatcatggtacgcttgtgttccgcaatcatctttttcttccgggatgccgaacacgataacagattgaatgcccagtttgaccagctccgctacttcatccttcaataaatctaatgatacatggtgaacatcaggcattgacggaacagcttttttgccttccagcccttcaacgacaaaaatcggatatataaaatctgatggatgcaaacgtgtttcctttaccatttctctcattgcttttgatgtccgcaggcggcggtgtctattaaatgattgactcatattctctcttcctctcttgacatgctgcacattaactcaagcatgccatctattgtaaatgtatcaggcgtatgcgatgtgatgccgtacgtcagaagggcatcatttgttaaaggcccaatgctgatacaggccgtcccattcgccttccacttttttaattcttctcccaagacatgcataaacgtatgtacggttgatgaactcgtaaatgttacatagtcaaaggaatattgacccgcagcgtctttcaatgcctcaatgccttcttcatccggaatcgtttcgtagagaacccattcctttacttcaaaaccgagcgggacaagctcttgttttatcacatcacgtgacaaattccctttcatcacggtaatggtctcccccggttcagcatgctgcttaagagcgtcagccaattgttcagcaatatactcctgtggcatcacatcaaccgatacgttatgcatttttaaacggcgcgcggttttttcaccgacggctgcaatttttttatgcgcagggagaataagctgattttccttcagataagaaaaaaagaagtctgccccgttcacacttgtaaaaacaagccagcctggcgcggcaagatcctctcttacctgttccgcaacatcattcggcaaagcgcggcgaaacgtaatcaaagaggttaaaaccgctttaccgccaagcgcctccactttttgctgaaatgatgctgcctgtgccttattccgggtgacaagcactgtttttcctttcaacggaaaatcattttccatcctcgtcaagctcccgttttacacgatcaattaaatcttttgctcctttgtcagccataagagcggcacagcgctttcctacttcctccggatcgtttccggtgacggtttctttaaaaatgattttgccgtcaggtgaagcgacaagacctgtcatttcaatttcatcctgtccatttaacacggagtagcccgcgatcggaacctggcagccgccctccatcgcgtttaaaaaagcacgttccgctaagacagtccgttttgtatattcatctgtaaactgagaaaacaacgccaacagctcttcatccgattctcggcactcaatcgccagggctccctgccccacagcaggcaaacagcgctcaggctcaaggaattcggttacgacatcttgcttccaacccattctggaaaggccggcagccgctaaaataattgcgtcataatcctctgtttccagcttttgaagtcttgtatctatattacctctaatccatttaattgtaaggtcagggcgctcaatcaaaagctgcgcgcttcttcttaaactgcttgtgccaatgacagcacctttcttcatttctgaaagctttacgcgattctttgaaataagggcatcacgcgggtcctcccgttcaggaatacagccgatcacaaggccttcaggcaaaacagcaggcatgtccttcatgctgtgcactgccatatcaatctcttcgtttaaaagcgcctgttcaatttctttgacaaaaagcccttttccacccacttttgagagtgtaacatcgacaatccggtcgccctttgtcacgatctctttaatttcaaaagcaaacgaaggattgatttccttcagtttttgaataacccattttgtttgagtcatagcgagtttgctccgtctggaacctactttaatcgttctcatcatttctttcctcccgaatctgcttgggacatcgtttaactgaaccaatggaattgcgacaggcttccaagcaggaaataattgatcatcagcaccagaaaacaagccgtattccacagtgcagcgacctttccttgcagctccttaatcagcctgatataaagataatagctgtacagcagcaggacgacaaacgaaccaagcactttggcgtcaaaccaatacagcgtttctagtgagacatacgcccaaatgacgccgagaatcaaactcagcagcagcatcggaaccccaatgacatttaaaacatacgccatataatcaagcttagataaatcttctattctcaacagccattttccccactttttctttttcagcagatgatattgaaacatatatagcacagaaaaaacgaaagaaagggaaaaagcgccgtatgaaagaatcgccattgtaatatgaatcaccaaaagctcggatacaagctgcccggaaaaagcagctgactgctgctctgtcggtgaaaatgtgtgaatggcgatcatagaaaatcctataacatttgtaaaaaacacgataaagtcaacacgtaaaagctttgtcagtacaagtgacagcgtgacaagcacccaggcataaaaataaagtgcctctgtcacatttaataccggaaaccgccccgtcacccacataaaataggccaaatacacggtttgcagagtccagacaatagaaagcaaccagaaggccatttttccagccttccggttgtgttgaagaaaatctataaaataaaagagtacacttaacgcgtaaatgacgattgtcccctcattaagtcttgccattgcagtatcaatcattcagctttcactcacttacaagtgggctaaagcccgcttttgattcagccttcttaaaagagtggaccttctggctgctttcaacggttttcatcatttgacggcccgcagcttcttcaatatcaaaaatctgcataaacaacgcgagcttttcttcagaatcagcatctgccgcaagctctttcacctttaaaatcggatcacgaagcatttggttaataatacttttggtgtgtttgttcaacagttttttctctcttgtgcttaagtgaggcagcttacgctcaatgctgtccatcgtttctgactggatggcaagcgccttttcgcgcaatgcagaaataacaggcacaacaccaagtgtattcatccattgtttaaattccacaatggtttcttcaattaacagttcaactttttcagctgtttctctccgctctttcatgttcgcttctacaatgccttccagatcgtcgatatcataaagaaaaacaccttcaagatcattcagcgccggatcaagatctctaggcacggcaatgtcgaccataaacagcggacgtcccttgcgaagcttattcgcgttttccatcatctctttggacacgacaaattcacttgcaccggttgaactgattaaaatatcagcctccgcaagcgcgctttcaagctgattcaagcttctcgcttcacctgaaaaacggtctgcaagctccttcgctttcaagtatgttcggttaatgacagtgaccttgccgattccctgtccgtgcaggttttccgcagcaagctcgcccatttttcccgcaccgagaatcaatatgtgcttgcttgaaagatttccgaagatttttttggcaagttcaactgcagcatagcttactgacaccgcatttgagccaatgtctgtttcggcgtgagtccgtttgcccactgtaactgcctgcttaaacagctcattaaaaatagtcccgatcgttttttcttgctgagctgttttaaagctgtcgcgtacctgtccgagaatctgcgtttcgccaatcaccatagaatcaagtccgcaggctacacggaataaatgctcaacagcggcatcgctctcataaaacgttaagaacggtgacagctcttctttgcttaattgaaaccaatcagctaaaaacttttttatataataacggccggtatgaagctggtcgactaccgcataaatttcagtgcggttgcaggttgagacaatgatgttttcaagaatgcttttctcttctttcagctgcaccattgcttctgccagctcattcggctgaaaacttactttttcacgtatctcaataggggcggatttataatctactcccacaacaagtatatgcatcgctctaattacacccccaacacccaatcttaatttataatcattctaacatagaactcattatttataataattataacatagtttctttcacaaaatgtgaacagattttaaaattcttatgctatattagaaaaagcttcagggaaaagaagcattcctattgacaataccaaaaacagcagaaatttactacacatcagctctaaaaaacaagaaggtgatatgcatgaaacaaaaatcaattttattcccttgtctgctgcttgccgcttctgtatatgcatggctagaaagcggccaagccgaactgttttcagggcaggatcaatggcctgttctcctcatgctgttaggcgcagcctttgtatatcaaggaaaaaaagaagccgtcacaccccatttttttatcggtttgcttctcttcgggatcggtttacacttttttgccaagccgaaatgggtatggtggccggatgattttgaaatgctcctctttatgatcggcttctcacttctcgtttcaaccgttcaaaaaaaagaatatgtatatgaagctgtgtcgatgatttgtttttccctgtttttgtactttttcaaacaaattatggcatggcttgagtctgcgcatattccaacagcgcttctgaaggagtattggccgtttgtctttattggaatcagtttattgttattattgataaaacgaaaaaaatctatacgataaataaaaccggtagaggatcctctaccggtttatcatttttttgatcgctccccaagcttcgtcttttccctttttcgtttctgaagaaaagaggatcagctcgtcttccggatcaatatttaatgtttgtcggacaaccttcgcgtgtttgtcccatttacctttcgggatcttatccgcctttgtagcgataacaataacaggaatgccgtaatactttaaaaattcatacatctgtacatcatcattagatggcgcatgccgcaaatcaacgatctgcaccacagcttttaattcctcgcgtgtcgtgatataggtttcaatcattctgccccatgcttcacgctcagactttgacactttggcaaaaccgtagcccggcacatccacaaaatgcagctcatcattgataatgtagaaattaagcgtttgtgtttttcccggctttgatgacgttctcgcaagatttttgcgattgattaatgaattgataaaagacgattttcctacgttcgatcttccggccaatgcgatttccggaagccccccttcagggtactgttccggttttactgcactgatcacgatttctgactttgtgactttcatttcttctctcctactaaggcatgttccaaaacctcgtctaagtgggacgccaatataaatgtcagcccctccctgacgctttccggaatatcctctatatctttttcattatctttaggcgcaataatggtcgttaatcccgctctatgtgcgccaagcgctttttcctttaagccgccgatcggcagcacgcgcccgcgaagcgtgatttccccagtcatgccgacttcacgcgaaaccgcccgtcccgttaaagcagaaacaagcgctgttgccatcgtaataccggctgacggaccatcttttggcaccgcaccctctggtacatgtatatgaatatcatacttctcatgaaagtcaggttcaatgccaagttcttctgttttggatcgcacatagctgaatgcagcctgagcagactctctcataacatctccgagctttcctgtcaggattaatttcccttttcccggtgaaagcgatacttcaatcgaaagcgtatctccgccaacggttgtatacgcaagccctgtcactacaccaacttgatcctctgtttcagcttgtccatatctgaaaatgcgttttccgataaaatcttgaaggttcttctcagtaaccgtaattcgttttcgctcttcagcaacaatggcttttgcagctttacggcaaattgcggcaagctggcgttcaaggcttcttacacccgcttctctcgtatagtaacgaataatatcaagaatcgcctgatcacgcagctgaagattgcttttcttcagcccgtgttctttgatttgctttggaagcaagtgatcctttacaatttcaagtttttctatttctgtgtagcctgcgatattaataatttccattctgtctctgagcgggcccgggattgtggccaaattgttcgccgttgcgataaacagcactttggataaatcaaaggtttcttcaatatagtgatcactgaagctgctgttttgctctggatcaagcacttcaagcatagcggatgatgggtctcctctaaaatcagatgacattttgtcaatttcgtctaataagaagaccggattcagcttgcccgcttttttcatcccttgaataatacgtccaggcattgctccgacataggtccgtctgtgtccgcgtatctctgattcatcccgaactcctccgagtgagattctgacgaatttgcgtcccaagctttttgcaattgatttggctaaagacgtttttccgacacctggaggtcctgccaaacagagaatcgggcctttcagggattttgtcagcttctggacagccaaatattctaaaatacgttcttttactttttcaagcccgtggtgctcttcgtccaagagacgtcctgcttctttcaaatcaagcttatcatctgtttcatccgtccacggaagagcaaccagccagtcgatatagttgcggatcacagagctttccgcagaacttgacggaattttttcatatctgttcaattctttaagcgctgtttctttcacatgatcaggcatgcctgcttcttcgattttttccgtcagcgtctgaacttcgccagttttgccttctttatcgccaagctctttttggatcgccttcatttgttcacgcaagtagtattccttctgcgtacgctccatcgaacgtttgacgcgctggccgatttttttctcaatctccagcacttctttttcattattaataaaatcaatgaccttgttcagcctgtctttgacatcagccgtttctaaaatatcctgcttatcctttagtttaaggggcagatgagaagcaacgatgtctgccattctccccggctcttcgatatcagtaaccgcagcgtacgtttcggccgagatttttttagaaatttttatgtactgatcaaagtggtctagcaaagtccgcatcaatgcttcgtcttctgtatcttttgaatcatcttcatgaataagttgaatgtcaaccgacgtgtaatcctcgtgttcattgtatttgacgatatgggcgcgcttgaggccctccaccaacacacgaatcgtaccgttcggaagcttcagcatttgcttaatttttgtataggtgccgacagtgaaaatctcgtcttcaccaggttcgtctatcgaaatatcctgctgagtggctaaaaatatcatatgatcatgcatcattgcctgttcaagagcctgaaccgacttgtcacgtcctacatctaaatgcaaaaccatcgtcgggtacactaataaacctcttaaagggaggagcgggatgctgcgttttaattcttctgccatgtgactgacacctccgtgactttagtatgaaccattataatacaactttttcatccttgtacaataaacggcatggttccattttctataaaacagtctcctcgtagtataccctttctttctgatatgaaaaaggaaaagatgtccttcatgaaaaaaaccctattatcaaaatagggtttaaacggattctttattgatttcgatatgaaacggtttttgttccgttggcggattcaccaaaatttcatcaagcacttcttggaacgtcttcactgcaataatctcgatcccgtcaatctgctttaagatggcctgctgattttcatatgggataatcacctttttcgcaccggactgcttggccgcttttattttcggaatgacgcctccgatgggtttcacaagaccgttcaggctgatttcgcccgtcatcgcaacggtattgtcaataggaattttgtgtatcgccgagaaaatccccgccgccatcgcaatgcctgctgacggcccatcaatcggaatccctcctgggaaattgatgtgaatatcataatcagaaggcttcattcccattgtccggagcacggttaatacattttcaaccgaacccttcgccatgctttttcgcctgatcgattttgattggctgccgatgctttcttcttcagctattcctgtgatgttaattgatcctttatcttgagccgcggttacacttacttcgatttccagaagcgatccgctgttaggcccatagactgcaagcccatttacaatgccaacctgtggttcaacaccgattttttgctcgtgctttggagtaagctgactggagtgaatgacccattcaatatcctcaatcgtaatgtcctttcgattctccgttacagccatccccgctgcgatttgaatcatattgacggcttcccgcccgttccgcgtgtagctggtcaaaagatccagtccttcttcggagatatttttttcaattttatccgctgctgttttggcaaccgttttcagctcgtccttttcaagctcgcggaaaaaaacctccaaacagcgggaccggatagctggcggaatttcgtttggcattctcgtggtcgcgccaatcaagcgaaaatcagccggcagcccattttgaaaaatatcatgaatatgattcggaatttgtgtattttcctcactgtaatacgcactgtctaaaaagacttttctgtcctcaagcaccttcagcattttattcatttgaataggatgcagctcccctatttcatcaataaacagcacaccgccatgggcatgggtgacagctccctgcttcggctgcggaatcccagcctgtcccatcgctccggccccttggtatatcgggtcatggacagagccgatgagcggatcggcaattcctctttcatcaaaacgggctgttgtcgcatcgagttccacaaagacagcctgctctttaaacggtgattgtttatgtttttttgcttcttccaacacaagccgcgcagcagccgttttcccaactcccggtggcccatagacaatcacatgctgaggatttggcccgcataaagccgcctttaatgctttaatgccgtcttcctgtccgacgatatctttaaagcttttggggcggaccttctcagataatggctcggacaagctgatagcgcgcattttccgaagctgctccatttccttctttgattctttatctatcgtgaccttttgtgtcctttgatttttaagcaaattccaaaaatacaaaccgatgatgatcccaaaaaacagctgaataaataacgcgatccctgtccaactcatggtggtccctcctgaaaaacaatttatgtatccaattcattcctctgattgctagtatctcccatagaagacgggaataaacgtttttccggaagagttgcatgcaaaaaaacctcctgagtgttaccactcaggaggtttgtgcttatctttatgcagatgttttatcttggcttacctcagtgccgtcttttaataagaggcgaggaggctctccgtgtgtcacagttgccccggtgattacacatttttcaatgtcatcacgagaaggcagctcaaacatcacatcaagcatgatgccttcaatgatagaacggagtccgcgtgctccagtcttgcgttcaattgcttttttagcaatttcagaaagcgcttcttcttcaaactcaagctcaacgttgtcaagctcaagcattttcttgaattgcttaacaagagcgtttttcggttttgttaagatcgcaaccaatgcttcttcgtcaagcttttcaaggcttgcaataaccggaagacgtccgataaattcaggaattaacccgaaacggagcaaatcttctggaagcacttttgaaagaagatcttctttctcaagatcagcagctttattgtcggcaccgaatccaatcactttttggcctaaacggcgtttgatgatttgttcgataccatcgaaagctccgccgcaaatgaacaaaatatttgttgtgtcaatttgaatgaattcttgatgaggatgcttacgtccaccttgaggcggtacgcttgccactgtaccctcaagaattttaagcaatgcctgctgtacaccctcacctgacacatcacgtgtgatagacgggttttcagattttctagccactttatcgatttcatcaatatagataatgcctttttcggctttttccacatcataatcagcagcttggatgagcttcaagagaatattctctacatcttcacccacgtatccagcttcagtcaaagatgtagcgtccgcaatcgcaaacggcacatttaaaatgcgagccaatgtttgcgccagaagggttttaccgcttcccgtagggccgattaatgaaatattactttttgaaagctcaacatcatcaactttgctgttggagttaatgcgcttatagtggttatacacagcaacagcaagtgatttcttcgcttgatcttggccgatgacatattcattcaaaatttcgcgaatttcctgaggctttggtacgtctttaaattctacttcttcttctgttccgagttcttcctctacaatttcagtgcagagttcgatacattcgtcacatatatatacaccaggtccagctacaagcttacgaacctgatcttgtgtttttccacagaacgagcattttaattgtcctttttcctcgttaaatttaaacattctttcaccccttaatcttgtctcactttttcttttaccggcagagcaaaagaaaatgattcttgaaacgaacgagtatgtattgcattttaccatactttccaaaaagacggtaacaatgtgtttctgacttgcacattctatatgtatgacaaaaaacagccctgcattaactatattgccccaagaaaaagagataactcataattgtacaaaacaaggcacgaatgattcgcgccctgttttattagtactattattatgcaccatattaacggttttctacaagaaaatcaattgctttgcgaacttttaaatcttctttcatcgcgtcagtagaaccgatggcttgtttaatattttcaacaggcatgttgtatgcttcagccatttttgtaagctcagcatcaacttcctcatctgatacttcaaggttttccgctttcgcaatcgcctcaagagtcaggttagattttacgcgtttttcagcatcttctttcatttgctctttaagcgcagcttcatcttggcctgagaattgagtgtaaagctcaaggttcatgccttgcatttgcagacgctgttcgaattctttcagcatgcggtcaagctcagtgtcgaccattgcttgaggcacatcgatttcagcattttcagaagctttcagaacaagctcttcacgcaatttagcgtcagcttcgttttcttttgcttcttctaaacgtttctttgttttttcagttaattcagcaagtgtttccacttcttcatcgatatcttttgcgaattcatcgtcaagctcaggaagctctttcgctttgatttcgtgaattttcactttaaacacagctggtttgcctgcaagatcttcagcgtggtactcctcagggaatgtcacttcaacatccttctcagcacctgcttcaaggccaactaattgatcttcgaagccagggatgaatgaaccagaacctacttctagagagtagttttcagcttttccgccttcgaaagcttcgccgtcaacgaatccttcgaaatcaagaacaactgtgtttccttcttcaacggcgccttcttcttttacaacaagctcagcttgacgctcttgaagggcttttagttcgttttgaacatcttcgtcagttacagttgtgtcgtctttttcaatgcccaggcctttgtattcgccaagcttcacttcaggttttactgttactttcgcagtgaagattaagctttcgcctttttcgattttttcaacatcgatttcaggacggtctacaggctcgattccagcttcttcaaccgctttagggtattctacaggaagaagaatatccaaagcatcttggtaaagagcttctacgccaaagcgctgttcgaataatccgcgaggaattttacctttacggaatccaggaattgaaacttgttttactacttttttaaatgcatcatcaagtgctgttttaaacgtttcagcatcaacttcaaccgttaaaacgccttcgttgccttcttgtttttcccattttacagacatgtgtttccctccaaaaatctattcaggttgtgtcggtcttccattctaaagcaatcattcggcttcgtccaacaaaaacaaagctgccaaagatcagaatcattatgtatagatgttaataatgaactgcaaagcctgtccaaccgtatttcttataacccgttatacacaaatacaaccactatattataacataacacatagcgctttcaactatatggcgcgatttacaaataagaaatttcttcaatatcttttaacattgtgcaagcttcatcgagttctctgtctgtaaattcatacatcatatgaagttcttcgctttcaatttcaatcccgtgcatctcgtaaccgactttatgaagggcagccgcccaaaggtcagccgacagcaatttcggctggaacggatataaaacgtacaaatgtcttctccacaattcttctactgctgcatataaggttggattttcatttccaagtgtctcatctagcaccctgagaacacggtgaagaatcggcgcggcatcaggcggaacaatctctgacggttcaattgtcaacgactcgccaaatttactaatgtgtacaggtttactgtactcatgctcagccaacagcatgacaatcatcgttttgataatcggatgggctgaggggtcttggaggattgttttgagcaatcctgtatactttgctacgttacggtcttttaaggaatgaatgagattcatttgctcctcagggcttgccagcactttctcggtgtcaattgtatcctcatattcttcggcccaagcctcgtcctcacgatccggatcggtcattttccggctgaaatccagcagcttataaaattgctcggcactttctgccggcagctgattttcttccaaaacggcttcaatggtgcttttgacttcttcgtactttttgagctgaattaagatggtcatgtacacctgcaaaaccgtaaaataatggccataaccttctttgagcatcttctcgcacacgctttctgcctcttccagctcgcccagctctaaaaagcagatggccatccctaagtgaagatcggattcagtatcatcatatttcatcgcttctgaaaacagttcaagcgcttcttgatactttttttccttgagtgatgacatccctttttccacaaggcggtctttcagatgaggaaaaggaataatttttgcgtttttcttgtcatgcgtcatacctatattcctttcaggcatttattttgttcaagtgtatcaacacctgtgaacaaaaacaagaaatgaaaggtttcaccaggcaaaaaaagccgccggacaaataccggccgctttttcaggcttgaagccaagagcttctttgtgattcaaattgcttgatttcatcttccagcagcagcgttaatgaaatttcatcatatccgttgatcagcatctctttccaatgcggatcaacttcaaatgaaatttgattgccttcactgtcatgaatcagctgattttcaaggtcaacagtcatttgcaatgactggttttcatactggccgacaagctgtttccaattgtcatatggcatgcggatcggaagcatgccgtttttaaagcagttctgatggaaaatatcagcgaatgacggcgcaatgataattttaaacccataatcatcaagtgcccacggagcgtgttcacgcgatgacccgcagccgaagttttctcctgctattaaaatggaagctccttgataaacaggctggtttaattcaaattcagggttcggttcaccattcgcatcatatctccagtcaaagaatgcaaaacgtccgtagcctgttctttcaatcctcttcaaaaattgcttaggaataatctggtctgtatccacattgatccgatttaatacggctgctttccccgtatgtgatttcaaaggttccatctcgcgcactccttacacaactgttttttcctgataaaactttctgacatcaacgaagtgtccgtgaatggcagccatcgcagccattgccgggctgacgagatgtgttcttgcaccttttccttgtctgccctcgaagttgcggttagaggttgatgcacagcgctctccctcaggaacaacatcattattcatactcaaacacatgctgcagcctgactctctccattcaaatccagcttccaagaaaatctggtcaagcccttctttttcagcctgaagcttcacgctttgggatccgggcacgacgatggcccttacgctgtcagctaccttcttccctttgatcatgtcagcagcctgtcgaaggtcagtcatgcgggaatttgtgcaggaaccgataaatacgtgctccactttaatgtcttcaattttttggtgaggagtcaatcccatatattcataagcacgaatcgcttcttttttatcgtcttctgcagaaaagctttccggcgcaggaacttcagaatcgacaggaagaaccattcccgggttaatgccccatgtcaccataggggaaattttgttgccgtcaaggacgatagatttatcgtaaacagcgcccgggtctgtgcgcagcgccttccattcctctacggccttgtcaaattcttcgccttttggcgtgtacttgcgatttttgcaatattcaaacgtcacctcgtcaggtgcaatcaaacctgctcttgctcctgcttcaattgacatgttacaaacagtcattcgttcatccatcgtcatatttctgaatacttccccagtgtattcaatgacgtagcctgtgccgaatttcacaccgtatttgccgatgacagcaaggatgacatcctttgccgttacccctttttgaagcgttccatctacgcgcacttcaagtgtttttggacgctgctgccaaagtgtctgtgtggaaaggacatgttcaacttcactcgtcccgattccaaatgcaagagcgccgaaagcgccatgtgttgatgtatgactgtcaccgcacacaatcgttttccctggaagcgttaagcctagttcaggtccgacgacatggacaatcccttgatccacactgtgaagatcggcaaggcgcacgccaaattcctcacagtttctttcaagcgccgttacctggcgtttcgcaacttcatcctttatctcaaaacgattgacagtcgggatgttgtggtccattgtcgcaaatgtgttttggggtcttctgacctttcttcccttttgtctcaagccttcaaatgcctgaggagacgtcacctcatgaatgaggtgcaaatcaatatagagaagatccggctttccctcaccatgttttacaatatgctgatcccaaatcttttcgatgattgttcgaggcatcatcttttatttcctccctctacctagagctaagaccgcttaacgtaagctgtcacacattagaaattgtattttcactcatgattgctgccttaacttcctctgtaatggcctgagtgctgctgaactcttcactccgtgccaagtctcttgttctttttccagaagccaagactttgtttaccgcatcttctacagctttcgcttcctcttcaagcccgaaagatgttctcaaaagcattgccgctgacaatatggctgcgaacggatttgccatccctttaccggcaatatcaggcgcggagccatgaacaggttcaaacagatgaaggccagagcttgataggctggctgacgggagcattccgagcgagcctgtaagcatggacgcttcatcgcttaaaatatcaccgaacatattttcagtcaccacgacatcaaattgattcggtgcataaattagctgcatggccgcgttatccacaagcatgtgctcaagcttcacatcaggaaattcttgtgcaacgtcctcagccacttcacgccacagccggcttgattcaagaacattcgctttatctacagaggtcactttgccttttctggctgccgccattttgaagccctctctgatcactcgttcaatttccgttcgcttataaaacagtgtatctactgcttcctgctcaccttcagtgtttacataacgtttgctcggctggccgaaatacaagccgcctgtgagctcacgaacgataacgaaatcaacattatctatatattcttttttcaaaggcgaagcgtcagaaaggctttcaaataccttcacaggccgcaaattcgcaaacaaatcaagctgttttctgatgctgagcagccctttttccggtctcagttccgaaggattttgatcccatttcggtccgccgacagcaccaagcaatatcgcgtctgcatttttacaagcagcaacggtttcctccgggagggggttatgatgttcatcaatagccgcccctccaatcaggccatattcaaattcaaattcatggttaaagcgttcggcaacacttttcagtacgtctgtcgctgattctaatacttcagggccgatcccgtctccgggcaatagagcaatacgtttcttcaagttaaccgttctcctttcttttatgatccgacagctgtgtggtttttcaatccgctcatattcgactggaaaaccaattgacggtttactgcgttcaaataggctttcgctgatgcttctaatacgtcttgcgctatgccccgccctgctgattcttttccgttcaccaaaactcttacatacacctgggcaaatgcatcttcgccttttctattagactgaatgcggtagtctaagagctccacatccttatcgatgcagcgctcaagcgtattgtagattgcttccacgcttccagctccagttgcagcttcctgaataagctgtgcgttttcttgatttttcaaagatagagtagccgtagggacctgacttgttccgtaatgtacttgcagagaaagaaattcatacccaatcttgcgatctgttactttttcttctaaaataagagaaacaagatcctcatcagtgatttcttttttcttctcagtcaactctttgaacatcgtaaagaatttattaatctcttcactgtcaaattggaatcctaaagcagtcagccggtctttaaatgcgtggcgtccggaatgtttacctaggacaagcgcatctgcggttacgccgacaagctccggtgaaataatttcataagtcgatttttcctttaaaaagccgtcctgatggatgcctgattcatgagcaaatgcattatctccaacaaccgctttgttgcgcgggacagccatgcctgtcagtttgcttactaaatcacttgttctcttaatctcgttcagcgtaatacctgtttcgacttggtagaaatcttttctggtatggagggctacggcaatttcctctaatgccgcgtttccggctctttcaccgatcccgttcacagcgcattcgatttgatcagcgccattttcaatcgcagcaagagagtttgcgactgccattcccaaatcatcatgacagtgggctgaaagctttgctttgtgaatgttcggaacgttttctttcatatatttaaagatatttccgtattccgccggggccaggtagccgacagtgtccggaagattgataacactggcgcctgcgtcaatcactttctcgacgatttctgctagaaacggcagttcagtgcggcaggcatcttcagctgaccattgcacaatcggaaaacgttcttttgcgtatttcaccattccaactgctctttcaatgacttgttcacgtgtcattttcagcttgtgcttcaaatgaatgtccgatgtcgcgataaatacatgaattcttggttgagcgccatcctttaacgcttcccaagcagcatcaatatcaccttttacacaacgggccagaccagttactgaacaatttttaatggttcttgcgatttcctgaacagctaaaaagtcacctcgggacgaagcgggaaatcccgcttcaatgatgtctgccccgagtctttcgagctgcttagctatggcaagtttctcctgtgtattcaagttcactccaggggactgttcaccatcacgaagcgtcgtatcgaaaaaattaattttgcgcaacggagaccaccgcttccttcttcttgccttgtttcacaaacggcatcatttcacgaagctttcttcccactacttcgatttgatgttcgttctcgcttgcattgatagcgttgaaacgaggacggtttacttggttttcgacgatccactcttttgcgaatgtaccgttttggatatcttttaatacttctttcatagattcttttactttagcgtccacaacgcgagggcctgatacgaaatctccccactgtgctgtgtcagagattgaatatctcattcctgcaagtccttcttcgtacataaggtctacgattaatttcagctcatgaagacactcgaagtatgcaagttcaggctgataacctgcttcagttaaggtttcaaatccggctttgacaagcgcgcttaatccgccgcaaagaactgcttgctcaccgaacaaatctgtttctgtttcttctttaaatgtcgtttctaatacgcccgctcttgcgccgccgattcctttagcataagcgagggctttgtctcttgcttctccagtcacatcttgatagattgcgaacaatgcaggtacgccagctccttgctcatatgttcttcttaccaagtgtcccgggcctttaggggccactaagaatacatctacatccgccggaggaacaatttgatggaaatgcacgttaaatccatgagcgaatactaatgattttcctgctgtcaattcatctttgatttcagcttcgtatactttttgctgctgctcatccggaagcagaaccatgatgatttcggcttgggctgccgcttcttttactgaaaatactttatgtccgtcttcttgggcttgagtgaaagattttccttgtctaacaccgacgatcacgtctactccgctttctttaaggttcagggcatgtgcgtggccttgcgaaccgtacccgataaccgctactgtttttccagccaatacgttctctttgatatcaccgttataatatacttttaccatttcaatctctcccttgttatgttttatacaatagatattgttttattggatgacgccttttgctgggttcccctcgcaaaagccgttgtacctgttctcgcgatttctttaatgccataaggttttaataactcaataagcgcttcaattttgttagattcacctgtcacctgaacaacgatgctgtctctgctgacatcaacgacagaggctctaaacggttctatgattccattaatctctgttcttgttgaaggtgcggagacaaccttgattaaggccagctccctctggacaatcgattgatttgtgatgtctgtgactttcagcacatcaatctgtttgttgagctgtttcgttaactgttcaacatcattttcaccttcaacatgaacgacgaaggtgattctggaaacgccggctgtttctgtgtgtccaactgtaatgctttcaatgttgtaatgcctttttgtgaatagaccggtgatccggtttaacaccccggagcggttcaccacagtcaatgtgataattcttttcaaggtttcacccccaccatttcatgcagccctttccccggagccaccatcgggaatactttttcttcgctggcaacccgcacgtcaatgacaacaggttctcttgatgttaatgcctcttccagcttttcctttgcttccgcttctgatgaaattctgatgcctttaatgccgtatgcttcggacaatttgacgaagtcaggctgagaagcgaatttagattctgaataacgttcttcatagaaaatttcctgccactgtctgaccattccgagacaagcgttatttaaaatcactaccttgaccggaagatttaattcgcgaataacatcgagttcttgaagcgtcatttggaatccgccgtctccgacaaccgcgacaacagtagcatctttttcggccagctgtgcgccgatcgccgccggaagaccgaatcccatcgttccaagtccgcctgacgtgacccatttatctgctttttggaacggataaaattgcgctgaccacatttgatgctggcctacatccgttgcgacaatggcctctccttttgtaaattgatgaatatattcaatcaatttctgaggtttaaaaccttcttcttcattatctacataccagagcggatactcttctttccattctgcgagctgttttttccattcgcttgaatcgctttgtttgccgtcttgtttgatcagctcctgcaggacaattttgctgtctccgactacaggaatctgtgttttcatgatttttccgatttcagctggatcaatatcgatgtgggctatctttgcgtttctggcaaagtgtttcaggtttcctgtgacacggtcatcaaaacgggcgccgatactgattaatagatcacattcatgaagggccatattggctgtataagtaccgtgcattcccgccatccctaggaaaagcggatggtcagccgggaagcctccgagccccaaaagggtgtgtgccacagggatttgctgctgttcagcataattttttaattcttctgacgcttttccgtgcagtacgcccgcacccgccaggatcaccggttttttcgcactgctcacggcttccacaagcttgcggatctgcaaataattcggctctgttgtcggctggtatcccgggagattcatctcatgatcgtagctgaattctccttcaattgttgctacatctttcggaatatcaatcaatacaggtccgggtcttccagttgttgcaatatggaacgcttctttaatgatgcgcggcagatcttccggctggcgaacctggtagctgtgttttgttactggcatcgtaatccctaaaatgtctgcttcctgaaatgcatcgctcccgattacagaggttgctacctgccctgtaaagacgactaacggcaatgaatcaatcatggcatcagcaaggcctgtaacaaggtttgtcgctcccggccctgacgtggcaatgacgacacccggttttccggagacccttgcgtatccctccgctgcatgaattgctccttgttcgtgacggggaaggatatgtaccaaccctgaattgtatagcttatcgtaaatcggaagcacagccccgcccggataaccgaagatcatttctactttctctttttttaatgattcaatcagcattaatgctccgctcatcgtctgtgtacattcggcagatgctgaatccacctgtacattagtccccattttagttcctccttttggattttcatcctttaaagatcatcttttcattagctagatagctgattattcaataaaaaaagcccttccgcccacaatcagccgcgcagtaactgcgatagctaaaaggggcgaaaaggcttttctttccgcggtaccacccttgtttacggcctgttaatcggccgtctcatggatatttctatccgctttagtaacgagtgaatcaagttcacccggccaagtcctactgtcatttcagactggcactctgaggcgagttcaccttgtaaagcttcgccggttctcagctaacccggttctctgtggaaaactttatcaaggctacttatcctcatctgcgcttttcatattcagccttcggaacggctttccagctgttcaagaaggtcgtttgtttttcatttttttagaatcatactgcgatgattttcgcttgtgaagcttgcatttatcttttgttgaactcatattacgccgctttggacgcagtgtcaacagcattttttaaaattattagacaattttgattaatcaatctatattgtatacgctttcattattggtacaaaaggaattgcaaatgttaaaagtttttataatttttttattaatctatcaagaatacaccagaattatttaattttatataaacatggaagattttataacacgatatggttcgtatatggattgagtctgacagatcatcttgcaatccatttcaatttcggataggcacttctcttgttccctcggcatacattaatgatatcttgcaaagaaaaggtgatacgatgaataaatcatttgcagacatgcaaggatttcctgcgggctttccaagcttccccaactttccgcagcagtactatcctgctgtccctcccttttaccagcaaagccagcagccatttggaggctacggatacggacagccgttcagtcaggcatacagcccgttaaccactccctctggaatgtactcctcattcccatacgcttcaggattttacggacagcaattttcaggtgcaggctttagcggccatggcggcagcttaagtgctccagcgatacatgccggcggattcagcggggcgccaggcgtacacggaggctttagatattaaagaataccacaagggccgaacatctattgcggtccttttattgttttaaaacgacttcacaagtacagtcacattttctgtctttatatttggaaacaggatggaatatgattaagatgaattgaacgatattctgcacaatccgtaagttttcgaggaggaataaaattgcatataaaaatagacgatttaactggacgtcaggtggtttcactggtgaatgagcatttacatagcatgacgcttatgtccccgccagaaagcattcatgccttaggtctagaaaaactaagagggcctgaaataacattttggagcgcatgggaaggtgatgaactagctggctgcggagcgctaaaagaactggacacccggcatggagaaatcaaatcaatgcgaacatctgcatcacatttaagaaaaggcgttgccaaacaagttctccagcacatcattgaagaagccgagaagcgaggctatgagcggttaagcttagaaacgggttcaatggcttcatttgagccggcaagaaaattgtatgaaagcttcggtttccagtattgtgaaccgtttgcagactacggtgaagatccaaacagtgtgtttatgacgaagaaattgtgagacggctttataaggatagataagtgcaggggaaggtctgtcttatctatctttttttatattcacacatttttcacctttatgatacacgccaatgttttcaattttgtttaattcaaagaacagcgggaattacaaacgacatgaacgatatcatgcaaattcataaaggaggagattgatatgaaaagcatagttggtgtatatgaaactccgcaggaaaccatcgcagcgattgaaggcttacttacaaaaggctatgattctgatgacatttctgttgtgacaagccggcgagatacagattatttggagtcacgtacaggaacagaagtcaatcaagctatcgatgcacatcaggacgaatctgaatcttttttcgataaactgaaagattatttcacaatggatgatactgctacacacagcaaagcattatccgacttggatattaaaactgatgaaatagacaagtatcaagaagatttggatgacggaaaacttctggtagccgtcgatacagatgcagatgtaattgctcctattgataacggcaatgccctttcaggcggcttttcaagcacaaatgaattggattatacaacgaaagaagaaaaaacgatgccgctccgggaagaacagctgaaggtcgataaggaagacgttcaaaccggcgaagtagaaataggaaaagaagtgaaaacagaaaaaagagatatggacattccggtgagacatgatgaaatttatgtcgaacgccgtccagtggatgaaaataaaacggacgctgctcccgtcaacgattcggaagagatcagagttccaatcgttgaggaaaagctggaagtgactaaaaaaccggttgtcactgatgaagtggttgtcggcaaacgcactgttgaagaaaatgaacatatttctgaaactgtgaaaaaagaagaacctcgtctgaataaagaaggaaaagttgacggcttggatgatgatccgttaaataacaaatgaaaatcatagaccgacaacaaaaaacctcaaatcctaaatggatttgaggtttttcttttggtacgtcccaggagagattcgaactcccgaccgacggcttagaaggccgttgctctatccagctgagctactgggacacgttttgtttttttgtttttcgctttaactatcagcgacaagatttattatatatgggatgcaataataagtcaacggttttttagaatttttttcatgaggaagaaaattttcttcctcatgacattttcatagtgtgactcgattttgcagatcctcaatttcattgcctgcttggtcgtaaaaacggactgtcgcagcatcattttctaatgtcagtatagcatagctttctgtcctgcgcaccctcggaagccggatgctgcctgggttaatcatcagttttccgcgcagcacttcgcttcccgcgatgtgcgaatgcccgaagcagataacatccgccccgagctcctctgcacgatagtatacgtttaacaaggtctgttttataccgtgaaggtggccgtgtgtgactagtatttttcttgagccggcagtcagaagaagctcgtccttaaaatcgccggcaaaatcgcaattgccttttacaaccgcataaggctccaatgcaggatgcctcgtctcaagctcagagtccccgcaatgaatcatgagatcaacttctgcctcatgccgtttcgcaatggtttggagttcttcttcaagcccatggctgtcactgataatcagcacgttcatgtacaagcttcctccttatgcctccaaaagcttagacagctttttaagcgcgtcagccctatggctgattttatttttttcatcacttgtcagttcagccatcgtcttatctttatctttcacgataaaaattgggtcatagccaaagccatattctcctctcggttcttcagcaatatacccttcaacatggccttcgactgtttttgtttcctctccgggaatactcacggccagtgcgcagcggaaacgggcggtgcgctgttctttttcgatacctttcagctcgctgagcactttttcgatatttgcctggtcgtctttctgttcccctgcatagcgggctgaataaaccccgggtctgccgccaagattatcgatggatagtccggagtcatccgcaatcaccattttgttcactgctttggcaacagcttccgctttcataatggcattttcttcaaatgtatggcctgtttcttcaatttcctctgtgaatccaatttcagctaaagatttgacatcatagcctcttggctcaagaatttctttgaattccttcacttttcccggattatgtgttgcaataattgcttctttcatgatgatcaagcctttctgtctttatttcagttctggcagagaatcacccagcacttctttttgcttgtcaatcagctcttggattcctttttccgcaagacccagaagaccgttcagatcctctctagaaaaagttgcctcttccccggttccctgcaattccacaaaacggccgctgcctgtcatgatgacattcatgtcaacttcagcagaggaatcttcttcataatttaaatctaacaaaattccctgttccttatcaattccaacagagattgcagcaagaaaatcagtgatcggatttgtcttgattgttcctgctttgatcagcttgccaatcgcaatcgccatagcaagaaatgcgcctgtaatggaagctgttctagttcctccatcagcttgaatgacatcacagtcaatccaaatcgtccgttcaccgagcttttccagatctacaacagctcgaagcgcgcggccgatcaggcgttggatctccattgttctgccggaaattttccccttagaagattctctgattgttctttggtttgttgcccgcggcagcatgctgtactctgctgtaatccagcctttccctccgccccgcaaaaacggcggtacgcggtcctcaacagacgcgttgcagattacctttgtatttcccgctgttattagaacagaaccttccggatggctgataaaatccaaatcgaatgtgattggacgcagctcatcgtgttgtcttccgtcatgtctcatgttttacctccgattgtatgtacataaaccatttttgtcccggaattgaataaagaaagaggcagccggaacgctaacctctttcttcctagtatatcaaaaatcccaatttaaaaactacccgtattcacttgagatggtctggagaccggttctgtgagcttttcgcctttttcatttaccagctctgattttccgttcactttaacagagacgctttttacatccggctgctccgttaacgtcagcacaatgctgttcagcacttctgaagaaatcattttcgtcttctcatcggcgctgccgaatatagattgattgaaatccaacgtcacgcgcccgtctttgattttcggtttgctgaccagctttacatcttcactgaagtctgttaacagcccgctcaccttgctcggccctttagccaattcattaatggctgctgtgatgtcgtctttttccgaattgtcgattcgtttggtcaccggcacgtagtattcactgtcttcattttccgccaaatagtagactgtcagcggatgggtagcagtgagatcatttacaccggctgtttccaaattaatgccgtctttgcggcttaaatcatctgagatcggcgtccctcctacaggcatctccttcagttcatgcccgtttattctcagcttcactttatctatcgaactaaattgcgtcagcgtccacgtcacagattgaacgattttctgttcgtcttctttcttataatttttgaactcattagagaaatcagctatcgccgttccatcttttttgatgtcaacgttaacggtggtgtcagccggcaatacagctctgaagccattcggaagaatttcagacacaggcccgccctgtacgaggtattcaagcgcctgcttagccgtgctctcacttttaggaagaggcagcgtttgcgcaacaacatacccgtttttatcaatgagataaagctccctcataacagtagatgaggcttgatccgcttttgcggtatcgcttttttcactttctgtttttttggctgctgttgtatttgaattggcacccgcttcatcgttcacgaatgtaacgtcttgaggcggatcaatttcctcggctgccttatcagattgaaacaaaccgcatccggataaaagcaaggcagaggtgagacaagtggcaccaatgactgcaggtccttttttcagcatacttttccctcctaaggatgtttgtactattatgtatacgagcctctttaggaaatagaccgaagaattccggcaaaacagaaaaaaacccgcaacataccgttgcggggaaaactatcttttaatcggttcttgcagtgagatacattccacatgcccgacttcatggccaaaccaatcgtctgcgatttttgcaaactgatcacgcgcccctgttgtcaggaactgatgatccggggcaatcggagactggttcagcagccctttataagagagaattgtgctgacttcccgggctgtttcatcgccggacgaaataatgtttacgtgctctcccatatatctttgaatggcttcttttaaaatagggtaatgggtgcagcctaaaatcagcgaatcaattgatgtgtcttttaacggatacagcgaggttttaacaatctcgtctgctgttttgtcgagaaacttcccgctttccacaaaaggcacaagcagcgggcaggcaaggttttcaaccttcaaatcagggtttaatgccaaaagcgcttcttcgtatgcattgctcttaatcgtattctctgtgccgatgacaccgatatgctgattatccgtcacttttatcgctgctctcgcaccaggctggatgactccgaccaccggtataccgacgctgcgctggatgtcatccaaagcgatcgctgttgctgtattacaggcgatcacgagcattttgatgtggtggttttcgagtaaataattcgtcagctcccacgtatattgaagcacctcttcttcagggcgcggcccgtaaggacaccgtttcgtatccccgacgtagataatattttctttaggtagctgtctcatgatttccttcgcaacggttaaaccgccaaccccggaatcaatgactcctattggttgttccaacaaaatcgcctcattttctcttcatttcatgctgcagtttcatcaaagatttttcgaagatggctatttcttcatctgtaaacgattcgaacatatcacgcagatattcctgtctttttgtaatgacctcttggataatccgttctccttcaggcagcagatgtatcctgacaacacgtctgtccgccgggtccttgacccgctcaacaagctcatttttttgcatgcggtcgattaagtccgttgtcgtgctgcatgccagatacattttgcccgataattcaccgattgtcatatctcctaattcataaagccattgcaagccgacaaattgcggcggcgtaatcgcatattggttaaggatttctcgtcctttttgcttaatgatcgcggcaatgtggcggagtgacttttcaatatccgcaacatgctccaaaggttttgatgtcatttgtccatccctcactcaaggatctcttacgcacaaaagcgttccgtgtctattttccttcttttttgaagaaaatgcaagactcgcaggagagaaatagaggactttagtcaaacaacatcaagaaataaaatttaatttatgacttgcctacgttttgcacagcattccaaatatggtttcgaatgttccaaacaaacagcaataaccggctccttccaaaagaaggaataccggcaaggattaaagctctagctcacccattctaagaagctcaacaacggcttgcgaacgccctttcacacccaatttctgcatggcatttgaaatatggtttcgaacggttttctcactgataaatagctcgcttgcaatctcctttgttgtcttatcttgaacgagcaattcgaacacttctctttctcttttcgttagcagcggcttcgattgaaattctttctccttcaagtattgtaaccctccttgctaaggtgagagcgaatcagaaacgaatgggttttgatatagtcgagatatcatatgtaagaagggcgcaggaggtgacgtttacaagataattagtttatcgtgtatgaagaagcgtttctttctcctcatccgtccagctgacagccttgccgctttcctttgagacttgaaccatcacgactgccccggtgaagcagggttcgccttcgaggttctctccgagatagtgcaaggtaagagatgaactgccgactgcgcttgttttcacatagatgcgcaactcttcataaggcatgacttggcgcaaataatcgcattgctggcttgccacgactgtcatggtctgtttgttttcactcatcatattcagctttttaaaataagaaatccgcacctcctcaaaatatataaaaggggttacattattcatatgcccaaacatgtctgtctcggaaaatcttacggataccttattgaaaaaagaaaaggatgttttccattcttgaaacggcatatcaatataagcgggaagcttcatcttttttcatctccttattgtttaaaaaaacctctcccatgcggaagaggttttttcttcttatactctgtcgcttccgaagaaattgcggaacgcttgtaagtttgtatctctattcaaggctgcaatcgaagtggtaagcggaatccccttcggacaggattgaacacagttttgcgagttgccgcaatctgcaaggccgccttcatccattaatgcttctaatcgttcagatttattcatggcgcctgtcggatgcgcgttaaacaggcggacttgcgacatcggtgcaggccccatgaacttcgatttgctgttcacattcgggcaagcttcgaggcagacgccgcatgtcatgcattttgataattcatatgcccattgacgacgtttttccggcattctcggccccggtcctaaatcgtacgtaccgtcaatcggtatccacgcttttacttttttcaatgaatcaaacattctgctgcgatcaacctgcaaatcacgaacgactgggaatgttttcattggttttaaacggattggctgttcaagctggtcaataagcgccgtacaagactggcggggttttccgtttataaccattgaacatgcgccgcatacttcctcaagacagttcatatcccatgtgacaggggttgtcttctcacctttgacattaaccggattccggcggatttccatcagagcggaaatgacgttcagattcgggcggtatggaatctcaaattcttcatcataaggcgtgctgtcagctgtatcttgacgtgtgataataaatcgtatggttttttgttcactcatgattatttcgccaccttcttcttcgagtaatcccgtttccgaggcgttatcagtgatacatcgacatcctgatactcaaattccggcgcttcatacgggcttacatgtttagccattgttgttttgagccattcatcatcattacgttcaggataatccggtttataatgggcgccccggctttcattacggttgtatgcgccaagggtaatcaccctcgcaagctgaagcatgttcgagaactggcgtgtgaacatcgctccctggttgctccattttgtcgtgtcattgatgttgatctttttgaagcgctccattaactcctgaattttgtcatccgttttcaaaagcttgtcattatggcggacaaccgttacgttcgccgtcatccactcaccgagctctttgtgaagaacataggcattttcggttccgtccatactcataatatcagcccatttttcttcttctttcttaacgtgagcgtcgaataaagatgaagacatgtcttccgctgaagattctaagccgtttacatatttcaccgcattcggaccggccaccatgcctccgtaaatcgcagacagcagggagttcgctcccaagcggttgccgccgtgcatagaataatcacattccccagccgcaaacagtccagggatatttgtcatttgatcgtaatccacccataaaccgcccatagaataatggaccgccgggaagattttcattggaagcttacgcgggtcgtctcccatgaatttctcataaatctcaatgatgccgccaagcttaatatcaagctctttcggatctttatgagacagatcgagatataccatgttttcaccgttaataccgagcttctggttcacacacacatcaaatatttcgcgtgtcgcaatatcacgcggcaccaggtttccgtatgccggatatttttcctccaggaaataccatggtttgccgtctttatatgtccacacgcgcccgccttcaccacgcgctgattcactcatcagtcttagtttgtcatcgcccggtatggctgtcgggtggatttgaatgaattctccgtttgcataatacgctccctgctgataaacgattgacgcagcagatcctgtattaatcatggagttcgttgattttccaaagatgattcccggtccgcccgtcgccataatgacagcgtctgaacggaaggattcaatttgcatgtttgtcaggttttgtgcaacaattccgcggcaggttctgtcatcatctaaaacagcgccaaggaattcccagccttcgtattttgtgaccagacccgcaacttcgtatctgcgcacttgctcgtccagtgcgtaaagcagctgctgtcccgtcgtcgcaccagcataagcagttctgtggtgctgtgtacccccgaatcggcggaaatcaagcaggccttcaggcgtccggttaaacatgacgcccatccggtctaataagtggatgatcgaaggcgccgcttcacacatcgccttgaccggcggctggttggcaagaaagtctcccccgtataccgtgtcatcaaaatgttcccacggagagtcaccttccccttttgtattgaccgctccgtttatgccgccttgcgcacaaactgaatgagaacgtttgacaggaacgatggaaaacaatttaaccgccattcctgattccgctgctttaattgtcgccatgaggccggcaagacccccgccgactacgataatgcttgattgactcatgatagcccctctccctctagtaatctagtactcttaaacaaatgcaaaaatcgcttttaagcctacgtatgacagtgcaacaaaaataatcagcgtaacgtatgtcgaaattctttgagaacgaggcgttaccgtgatgccccatgtaacagcgaaagaccataaaccgttcgagaagtggaaaattgttgataaaacaccgacaatgtaaaaaccaagcatagccggagagctcaaaatattcgccatcatgtcgaaattgacctcagcacccatttgtgcggcaatgcgggtttcccacacgtgccagctgacgaaaatgagggtgatgataccggttacacgctgcaggacgaatagccagtttctcatgtagctgtattgaccggcgttatttttcgcagtaaacgctatgtacacaccataaactgcatgataaattaatggtaagaagataataaaaatttccaaggcatacctgaaaggcaggctatccataaaatgagcagcgctattgaatgcttcagcgccccttgcggcaaactggttgacgactaaatgctgaataagaaagatgccgaccggtatgacgccaagcaaggaatgcaatcttcgaaaataaaactctctgttcccagacattactttaccccctgtttgataagtgcgaaatgtgctaaatctcttcccccacttctttcaattgtaagcactttattaagatttattgacaatttcattttactcctccctcaaaagggcgtcaagaaaacgcgtacataaattataattttccgaattgattagttgattgaaaaattttattttatcaatatatatttcttgcttaatttttcataagaattacaggatcattctgtaatcctcccccctgtttgagctataatatacgcaggagagaggggagacagatatgaagtctaaatttgaagcatctattgacaacctaaaagaaattgaaatgaacgcttatgcctacgaactaatacgagagatcgttctcccagatatgcttggccaagattactcttccatgatgtattgggcaggaaaacatctcgcccgtaagtttcctcttgaatcatgggaggaatttccggccttctttgaagaagcgggctggggaaccctcaccaacgtaagcgctaaaaaacaggagcttgaatttgaacttgaagggccgatcatttccaaccggcttaagcatcagaaagaaccttgctttcagctggaggctggttttatcgctgaacaaattcaattgatgaatgatcagattgccgaatcatatgaacaagtgaaaaagagagccgataaagtggttctgactgtgaaatgggatatgaaagacccagtgtaatcaaaaaggcggtgactgcatagtcccgcctttttgattgtcattacacagctgaagggtgttttgaaagctcaaatgcatcgtgaagcgactcgactgctttcaccatgtcattttcgcttacgactgttgacactttgatttcagatgtgctgaccattttgattaaaatgtttttttgcgccagtacagcaaacatttcagccgctacaccgggatttgagaccatgccggatccaacaatagatactttagccaatttgctttctgtctcgattttctcaaattccagcgcgtctttatactcttcaagcaccgcaacggtttggtctgcatcttctgttttgacagagaaggaaattccagtcttgtcctcggcctgcgtttggataatgatatccacgtttatgtttcttttggcaagtgttgtaaaaatagtagacaaagttgtcaggccgctagtcagcccgtaaatggttactcttgtgatttgatcttcaaatgcaatgcctctgacaattaaattctgttccatggatgattcctcctcaattaatgttcccgcttcggtttctgtacttgaacgcacttctaacggcacttggtaatttttcgcgaactcaactgctctcggatgaagaacaccggcgcctaaattggcaagctcaagcatttcatcgtatgagatgccctcaagttttctcgctgatttcacatagcgcggatcggttgtaaacacgcctggcacgtctgtgtatatgtcacatttatcagcttttaaagcggcagccaaagcaactgctgttgtatctgaaccgccccggcccaatgtcgtaatttcacaatcctctgtcatgccttggaatcctgcaacaatgacaatttttcctttttcaagctggtctgctaaaaccgaagtgtcgatatctgtaattctggcgtttccgtgaatggcctccgtacggattcccgcctgccagccagtataagacacagcgtcatagcctttttcctgcaatgccattgaaaggagtgaaatcgtgacctgctcgcctgtcgccagcagcatatccatttcgcgtttgctcggctggtcagaaatagcttttgcaaggctgaccaattcgtcagtggattttcccattgctgaaacgacgacaacgacttgatggcctttctgtttttctgcaattgcgcggtttgccgcattttgaattttttcgactgagccgacggaagtgcctccgaatttttgtacaataagacccatgtattaccaccctttacattttggttcgtgcgggtgaggagaaagagcgctttgtccacaataaaaaaagcaatgagaggaatactctcattgcttatcaattaatcatcataaatgattatgaacaacgagatagccctccaagaaaatgatttcttgacagccttacatttattcaatgcacggccagcaaataataccgatggggttttatttgcttcggcgacgctcccctttcagcctttttcacagaatccatctttctccaaaggcatactcttgaagttcgcacctctatcttcaccatataacacgatctaactatgaaattagttcacattttatcagatcttatttaaaaggacaacattatttttgcaatttgtcgtaaaggagctgagccgccgctgcgggaacaccggcttttttgatgtcctcaaggcttgcttccttcatttttttaacggaaccgaaatgctttaacagcattttctttcttttctctccgatacccgggatgtcgtccaaaacggattgaaacgcgctttttccccggatttgcctgtgaaaactgattgcaaaacggtgcacctcgtcctgaatgcgctgcaggaggtaaaattcctggctgtttcgttccagatacgccacctccagcggatcaccgatcagtaaatttgaggttctgtgtttttcatctttcgctaaaccggcgatcgggatatccaagccgagttcattttcaatgacatcccttgctgcgttgatctgcccttttcctccgtcaatgataatcagatcgggcagcggcagattctcacgaagcactctcgtatagcgtcttctgacaacctctctcatagaaccgtaatcatccggccctgtaacagttttgattttatatttgcggtattcctttttgtatggtttgccatcgataaacacaatcatcgcggaaaccgggtttgtcccctgtatatttgagttatcaaacgcttcaattctgtgcggcgtataaatatttaatgcctcacctagtttctgcactgccccgattgaacgctcctcgtcccgttcgattaaagagaatttttctttcaatgcgattttcgcatttttatgggcaagcatgagcagttcttttttcgggccttttttcggctggtgaacgtttgtttccagtagctgctcgatcatagattgatctatgctgtccggaactaaaatctccttcggaaggaagtggttgttttttgaatagaactgcccgatgaacgtgaggaactcttcatctgcttcctgataaagcgggaacatgctgacatcgcgttcaatgagctttccttggcggatgaaaaagacctgcacgcacatccagcccttatcgtacgcgtacgcgaacacatcacggtcgactagatcgttcatcgtcattttttgtttttccatcgttgattcaatatgggcaatttggtcacgaagctcttttgctcgttcaaactcaagattctcagcagcttcatgcattttctcttcaagctcttttttgacctcattatagccgccccttaagaaacgtgtaatgctttcaaccagctctctgttcgtctcttcggaaatatcctttacacacggagcaaggcattggcccagatgatagtaaaggcacactctgtccgggagcttggagcattttctgagaggatacagacggtcgagcagtttttttgtttcccttgctgcctgtacattcggatacggcccgaaatagcgccctttgtcttttttgacattgcgggtgacaatcagccttgggtggcgttcatgggtgagttttatgaaaggataggttttgtcgtctttgagcatgacgttgtatttcggatcatgctttttgatcagattcatttctaaaataagcgcttcaagattggaggacgtcacaatatattcaaaatcctcgatttccgtcacaagcctttgggttttcgcgtcgtgagaaccggtgaagtaggagcgcactctgtttttcagcacttttgctttccctacgtagatcacagtctgctgccggtccttcatgagataacaacccggttgatcaggaaggagggcgagtttttctttcagttgtttgttcatatgttacccttccttatgtttaatcctttatttccagtttaacacgaacgtttgtttttctctatggttcacaattggcgaataaaaaaagcgatccctcaatcggaatcgctctggcatgtaagcagcggaaaattaaagatgtttgtttacaagctcttgaagcgcttcttttggtttgaagccgactgaagtttcaactacttcgccgtcttttaacacaagaagagtcgggatgctcataacgccgtattttccggcagtttcttggttttcgtctacatcgatttttacgattttcagtttgtctcccatttcttgatccaattcttcaagaacaggtgcaatcattttacaaggtccgcaccaaggagcccagaagtctgccagtacgacgccttcgcttgtttcagctgagaaagattgatcagttgcttttacgatagccattattgaattcctccaatgtgaaatgatgatttttagtatagcatctcccattcgttcacgctattttaatgcttacaaattattttttcctgatcacagccggtttactcatttttatatggttgaatgggatatgctctttttttaaaacacaaatctgataatggccccgatcactacaattgccccaataatcattaaaatggtacgaagcataagatcacatctcctcttcactgtcatgtactttaccatgccctgccggagctgttttaaaacctgaaaaagagcgccggcatgaagctccggcgctcttgcgcgattaagaatcagcacgcagcgtaagtaagacgactgacattggcgggagttttactttcagtttgtttttgctgagcgtgtattgtctgaaggattccggtttgacatgatgaggatcgtcaaacgtgttatgcgcattcattttttctgccgtaagaatgactccggaatggtccgctgccttgtgtaggcccctcagctcgatttccgcctctgctttgttttggtgatcgatgttgcaaattgtgatattgatatcgccttcagcttgtttcgacgctgaaatgctgatttgcggaagcgtttcaccgttccattcatagtcggcagacattgtctctgtggctaaaagagaagcgtcctggtgcaccttaaacatattgaatacatggtacgtcggtgtcaaaagcatccgctctccctcagtcaaaatcatcgcttgaagaacatttactgtttgggcgatgttggccatttgcacccggcggcaatgctgatggaaaatgtggaaatgagaagccgccaccagtgcatcacgaatggtgttttgctgatataagaaaccgggattcgtgcctggctcgggatcaaaccacgtgccccattcatcaataatcagcccgacccgctgctccggatcgtaccggtccataatcgtgccgtgtttttgaatcaattcatcgatgtatttggcttttttcatcgtaataaaccattcatcttccgtgaattctgtggctgatcctttgcccttccagaaatcccccggaatcgtgtaataatgaagactcaacccgtccatcaggccagcggcttttttcataagcacgtccgtccaattaaaatcatccacatttgcgccgcctgcaattttataaatgtcattcccgctgtaattgcggacataagtctgaaaacgccggtacagatctgcgtagtattcgggatgcatgttgccgccgcagccccagttttcattgcccacgccgaaatatttcagcttccaaggctcttctcttccattttgctttctccagtctgacatcggcgtgccttcttcaaatgtcatatactcaatccactccgacatttcctgaacggttccgcttccgacattgccgcaaatatatggctcgcattcaagcagctcgcaaagcatcataaattcatgcgttccgaattcatttgattcaattgtaccgccccagtgagtgttcagcattgtcttacggtcaccgacaccgtttgcccaatggtattcgtccgcaaaacacccgcccggccacctaaggacaggaatgtgcagctgtttgagcgcctccagcacgtcctttcgtatcccgttgatattggggatgtctgagtccgttccgacccagatcccctcataaatccctcttcctaaatgctcagcaaaatgaccgtatatatttttgttaatggttccttttgcgatatctgtttgaatcactgcttgatgttcagacatgcctctgatcattcctttcatacggatatgaaaagcaccacagtcaaatatgtgatctgtcgtttgcctgaggagtcagcatgaatgtaagcgcttttaaagtaaccatattatatatgttcgtacatgtcaacgacattttctattgtttttatatttgtacgtatgtatttataaatatgaaaaaacccggacttttaaagtccgggatttcctttatgagtgtatattcagctgtttgaattcctcagttaataacgggacaacttcaaataaatcaccgacgatgccgtaatccgctattttaaagatatcggcttcggggtctttattgatggcgacgatcaccttgctgtttgacatgccggccaaatgctggatggcgccggaaatgccgcatgcaatgtacaaatccggagtaacgactttcccggtctgcccgatttggagagcataatcgcaataatcagcgtcacatgccccgcgagaagccccgactgcggcccctagcacctctgcaagctcctgcagcggctgaaatccttccttgcttttgactcctcggccgcccgcaacgataattttcgcttcggagagatcaacaccgtccgccgtttttttcacgacctcttggataacagtgcggaggtcagtaagagaaacatcaatgctttcgatgctccccgatctgctggtgtctttttctgaagcttgaatgttattggggcgaattgttgcaaagatcatcggatcggttgaaatgacgcgttcaaaagctttccccgagtaaatcggccgtgtgaacacaacattccctccggtaacgcttacatctatagcatcagaaattaagcctgtttgcagacgggcagcaagcttcggtgaaagatccttgcccattgccgtatgcccgaagatgactgaatcaggattttcttgctcgataacacctctcatgacctggctgtacccgtctgccgtgtatgttttcagcttcgggtcctcagcggtaagaactttatctgctccgtaatgaataagctcttgtgcaatgctttgtacattttcaccgatgagaacaccgatgacttccccatctcctgaaatggttcttcctgcagctattgcttcaaaggtgacatttcgcaattccccatcgcgtatttctccaagcacgatcactttttttcccattctaacatccccctgtttctttgaatgtccaagttttaaatgactttagcttcgctgcggagcaatgaaacaagctcttttgcctgttcagcaggctcaccttggagaagcttcccggcttcttttttcggcggcagaaaacgttcaatggttttcagctttggttcagcatcctcttcgtccagatcaagatcatcaagttcaagctcttcaagcggctttttcttagccttcataattcccggaagcgatggatagcgcggctcgtttaagccctgctgagctgtgacaagcaatgggagcgtcgttttgattttttcaacatccccttcgacgtccctttctgcttctgcatcagtgccgttgatttcgagtttggtgatcgtagtgatacacggaatgtccagtagctcggcaagccgaggcgccacttgtcctgatcctccgtcaatggcaacatttccgccgagaatcaaatcaaactcctgatccttcatatagtggtataaaacttgagaaatggaatattggtcgggttcatcaagatcatcttctatgttgattaaaacagcttggtcacaacccatggcaagcgccgtacgcaattctttctccgcttcttcaccgccgaccgtgacagcggtgatcgtgccgccatgcttttccttcagctggatggcttcttctatcgcgtactcatcatatggattaatgatccattccgctccgtcatcctgaatctttcctgtttcaatgacgattttttcttctgtgtcaaacgtccgtttcatcagtacaaatagattcatgatcatatccccttttattcgcctttgaactgaggctttcttttttcgagaaatgcctggatgccttccttggcgtcctctgactcaaatgcttccccaaatcgctttgcttcaagctttaagctgccttcataggaatacaccttgttggaataaagaagttcaagcaaagatgccagcgtttgcgggcttttctctgcaaacttagcggcaagtgcttttgctttttcaatcacttctgcctcatctttcgctccaattgagacaagtccgagatcaagcgcttcttttccggatatcggttctcctgatccgatgagctccagtgctttggctgtaccgacatatctcggaaggcgctgtgtccccgcaaaacctggaatgataccgagattaagctccgggagccccagcttagcatcttctgccgcgattctgatgtgacaggccattgcaagctccagcccgcctccgagagcagcgccgtgaatcgctgcgataatcggttttggaaaactttcgattctctccattaactgctggccgcgctcagcgagcaatgaggaatcctcattgcctttaagcgatgtaaattctttaatatcagcgccggctgagaaaaatcttccctcgccgtgaatgataatgcttcgtacgcctgcatctgtctcacattgatcaagacaggaagacagctcttctaatatccggcttgaaagcgcgtttgccggcggattgtgaatcgtcaagactgccacaaattgatcaaccgcaagtgaaattgcattcataggacagaactcctttacttattgtgaattccggataccaataattctaaaacgctgtttgaaagcgcaacgagatcgtacttttggtcattcatcacccaagttgtcacagtttcgtcaatcgttccaaaaatcatctgccgggcgaggcggacatcgaggccttcttttatttcgcctgattgtataccttccgtcaaaatgccatccaaaatatttaagtagccttttaatatttcgttgattttttggcgcagctccaagttggattggcggagctcaagctgcgtgacaatggcgagattatggtcacccgctaaaagggaaaaatgctttgaaatcacaagcgccaatttctctttcgctgttgctttttctttaatgtcctcttccatccgctcaataaattgacccattttttctttgaaaagagaaattaaaatatcttctttgtttttaaaatagagatagatggtgccgtccgctaccccggcttgtttggcaattttggatacctgtgactggtggtagccgttttctgcaatgacttctactgctgcatcaataatctgcatatactttggccgtttttgcttcaatgttcatcgttccttcctatagaaatgaatgactattcattcataatttcatgataagaaggattttcaggtttgtcaagtttattcataggcgttctctttttttatttgatatgatgattttcggtttcttcttcaagtaaacgccttcttaaaatttttcccaccgccgttttcggcagctcctttctgaactcataggctttgggcaccttatagggagctagacgtgatctcgcaaaagcgtccagttcttctgtatcggcttttgcgcctttctttaatacgacaaatgcttttactgtttctcccctgtaggaatcgggaacgcctgcgacaacaatttcctggatggcttcatgttcataaagcgcttcttctacctcacgcgggtaaatattgtaaccgccggcaatgatgatatccttcttcctgtcagcaatatagaaaaagccttcttcatccatatagcccatgtccccggtgaacagccagccatctctcagcactgcggcggtttcctctggtttattccagtatcctttcatgacttgcggaccttttacaatgatttctccatgctcatacggagcggcaagctcacccgtctcttcagaatagatcgcagcgtccgtactcggccaaggacagccgatactgcccggcttgttttttccccagataaagttggcgtgcgtcactggggatgcctcagacaaaccatagccttccacaagctttccaccagtcaccttttcaaatttctgctttacctccacggggagcgcggctgatccgctaagacagcttttaatggatgacagatcataatgctgcaattcagggtgatgcaaaaggccaatgtaaattgtcggtgcgccaggaaagagcgtcggtttgtgtttgtcgatgattttaagtgtttcgagcggatcaaacttaggaagaagaatcatttcgaagcctagtttaatcgaatagttcatgactgccgtcagtccgtagacatgaaaaaatggaacgatgcccagcactttttcagcgccttctttcacgtcatacatccaagcggcgcacatttcagtatttgccaaaatattttggtgcgtgagcatgaccccttttggagctccggttgttcctccggtatactggaggacagcgatatcatgctcaggatcgatcttcgggattgtcaggagttcagttttttcctgcttcatacaggaagcgaacgtgtgaatgttagctgttttgtcaaagtcgatatgcactttttgtttttgcgtcagcgggtaaagaatatttttcggaaaaggcaaatagtcttttacactggttatcaaaatctggtcgactattgataacgttttcatttttattgccttcgggaaaagcaaatctaaggtgatgattacacttacctgagcatctctaagctggtattcaagctcatgctcggtataaagcggattcgtctgcaccacgatgccaccggcaaacaagacgccataataagaaatcactgtttgcgggcaattgggcagcataacagccactctgtctcctttttgcaggccattgcactgcaaaaaagctgcaagtttaagagcatccgtcagaatgtcatgaaaggtgagtttttttccataaaacgatattgcggttttatcagggaatcgtgcggcggagtctgtcaggatggattgcagggttttattcggcaacggaagctcatgcgggatatcgttgggatactcggcaagccacggcttttgagactgcataaaacctcccctttcgattttagagatccaccttatcattatagcagatggacggcaaaaaaaagaaaaagaaaggtaaatctttctttttctcataatatgaacagatatataagaccaattaacaaaaagattcccgctgcggcgagcagtattttcgcaagcttttccatctattctccgtccccttatattccggctgccaccacaaaagaaagcccgacagaaatgacaaatgaaataaagccgacagcccggttatcattttcgatttcctgatcaattttaaaccgcggagtcaaaaactcaaaaataaagtagctgatcagaagcataacaaacccgtaaacgccccagccgatcatttgcagcagcgaattatgctgggagatggaatgctgaaatacgtttgcgattcccaaaatttttccgccggtcgccattgccaccgcaagatttcctttttgaatctcttcccagtttttataagccgtcaccagctcaaacacagtcaaaaagaggacgaggcagagaaccgcgacactgtaatatgccgcgatttccacaagctcgttttcccaaaaatcactcatggccatactcccttttattttagttcaacaaccgtaacgcctgatcctccctcacctgcttcaccgaaacgggaacttttgacgctgcggtggtttttcagaagatcctgtacgccttttcttaaagcgccggttccttttccgtggatgattgacactcttggatatccggctaacaccgcatcatccaagtatttttcaacccggctgagggcattttcatagcgttcgccgcgaagatcaagttcaagcgatacgtgatagtcctttcctttgaccgctgtaatcattttttctttttttggctccggagctgatttgataaactccagatctttttcttttactttcatctttaaaataccgatttgaacgttccattcattgccgcctgttttttcgagcaatgttcctttttgcccgaaagtgaggactttcacctcgtcgccaggcttaaagtcgcgtttttgcgttttcggcttttccggtttcttggacttttcaaaagcaggcatagcgccttctaaccgtttcttcgcgttaatcagctcgtgatccttgaaggatttgtgttcttcttttatggtgcgcaattcatgaataatgtcctcggcttctttcattgccgcttttactttttcagcagcctgctgttctgcctcttcaagcattttgtcttttttgctgttaagctcgatgatttgctgctgcagctctttatgcagtttttccgcttcttttctgattgattctgtctcagaaagctcttcttccgcacgttttttgctttgttccagcgacgcaatcatcgtatcgacttcgttatgctcggccgtcatttctgacttcgcctgcccgatgatatggtccgggagcccgaggcgttttgaaatttcgaaagcattgcttcgacccggcacaccaattaaaagtttataggtcggtgacagcgtttcgatgtcaaattcaacgctggcattcatgacgccttctctgttatagccgtacgccttcaattccggataatgcgtcgtagctaacactcgtgcattggtgcgatgcacgtcatccaagatgctcatggcgagggccgccccctcctgcggatctgtccctgcaccaagttcatcgaaaagcacaaggctgttttcattgacctgttctaaaatgccgacaatattcaccatatgggatgagaacgtacttaaactttgctcaatcgactgttcatcaccgatatcagcgaatacgtgctcaaatactgccgcttctgacccttcatctgccgggatatgaagacctgactgcgccattaaggttagcaggcctaacgttttaagggtgactgttttccccccggtgtttggccctgtgatgacaatggttgaaaaatcgcggccaagctcgatgtcattggcaacaacctgatcaggcggaagcaatggatggcgggcttttttcaaacggataaagccggtgtcgttcataatcggttttgtcgctttaaccgcttttgcatatctagcttttgcaaaaataaagtcaagcgtctgcagcacttgcaaatctagaaatagctcctctgtatactctgccgttttctctgtcagcacacgcaaaatccgttcaatttcttgcttttctttcactttcgcctgctgaagggaattgttcatatctacaatcgcctgcggttcaatgaatagtgtcgcaccagaggatgaggtgtcgtgcacaattcctccatagctggatctgtactcctgtttgaccgggatcacaaagcggtcattccgaatcgtaacaatcgtatcagacagcattttcgatgcggaagaggaacgcagcatcgactctaaccggtctctgactcttgattcgagtgttctgagctgtgtgcggattcctcttaatgtttccgatgcatgatcaagcacttctccgtgatcatcaatgcaggaattaatgtcccgctctaaatcggacagcgtgataagctgttcagcatgctgatggatcagcggaatgtcgacaccgtcttcagccatttgcgtgataaaatgtttcatttgtttaactgcataaagcaggcctgagatttcagtgaattcagaaggactgagaacgctgccgatttccgcccgtcttaacgctcctctgatatctacaaggccgccaaatggcgcttggcctctcagccggataatgtcagaagcttcgtctacttcatccagctgttttttgatttcgtctatagaagcagaaggcttaagctcgagaagcatttcttttccgagcgatgaagcggcatgcccaataacctgttctttcactttatgaaattcaagagctgataatactttttgctgcacgattgtgtgagcctccttacttaatcgttgcgcttcagaaatgcctctacgtctttaagcgaccgggcattcagaacgtttttcgtttccgtccatcctttgcgcgcggcagtaacgccagttttcatatcgtctaacatctcaatattatgggcatcagtattaatcaccaatgtaaccccttgttcgtttgctttcattaaatgctctgtgcgcagatcaaggcgcgcagggttggcattgagttcaagcgccgtatttgttttcctcgcaagctcaatcagctgatcaatatcgatttcgtaaccggcccgtctgccgataaggcgcccggtcgggtgtgcgataatgtcaacatgcttgtttgtcagtgccgtctcaagccgtttcataatcacgtgttccggctgattaaaactggaatgaatcgatgcaataacgatatccatttccgcaagcacatcgtcatcataatcgagcgtaccgtcaggcaggatatccatctcaacgcctttcaaaatacggaagttttcaaactctgcattcagcgcgtcaatttcttttgcctgctgcttaagtctttctgcagtaagcccgttggcgacctttaaatattgtgagtgatcggtgatcgccatgtattgatagccttttttgatgcaggcttcagccatctctctgatcgaaaatgcgccatcgctccacgttgagtgcatgtggagatcacctttgatttgcccgagctctatcagttcaatgctgtcgctgtaggtttccacttcctgtccgctttcacgaatttccggcggaatcagcggcaggccgaagtgcgcataaaattcacgttcactcggaaatgttttgatctctccggtttcaactgtctcaacgccgtattcactgatccgctcgccgcgttctttggcgatttggcgcatcttaatattgtgatcctttgatcccgtaaaatgatggagtgttgtcggaaactgctcttccgtcacaagacggaaatcgacgcttgtttcatattcaaaggaaaggatgacggacaccttcgtatctccgcttgcgatcacgcttttgatgtttggcagctcaagaagctgctctcttacttcagccggatgatctgtagcaatgatataatccagatccttcaccgtttcccgcgctctgcggagacttccggcacgagaaaatttgatgatatgcgtaaattgagaaagatgctcctcaatttcccgcgcgatccggagggcgtagccgatcgggaaccgttcaggctgttttccggcttccccgagcgcctgtaatattttttcttccgattttttgccgaagcccgcaagaccctggaccttttgctgctcacaggcttccttcagagattctgcatcgtgtacgccgagctctttatacagctttgcgatttttttgccgccgagccccggcagcttcaataaaggcacgagtccttccggcacttctttctgaagcgattcgagcgtgcttgactttccttcatctatatactctttaatgacgctgtacgttccttttccaatgccggacagcgacatcatatcgtccatttctgataagcttcggtcgtcctgttccagagctgccgccgcttttcggaaggcggatactttaaacgggttgtcccctttgagttccatatagactgcaatggtttcaagcagccggataatatcttttttatgcatatcataacccccagacgttcacatatgtttccatcatacttgaaaaaaacttctccggacaagagaagtttttttatgccccgtactgtgtccacagctcttgtaaaagccctgacaagtacggtgtatggttaatgatcacatttgcgagagacgattgccccatcatttgctgcaacgcgtctaccggcagaacggatgcgacatacagcagcacaaatgtaaataaatagacttctagaaaaccgagaacggctcccagcatctggttgatttgtttaatcaccggaatgccggctacaatactcaggaacgagccgatgattctcagtaagattttagcaatgataaataaaacgataaacgcaatcgcattatagtacgctgcttccaaattccccgtaaaaaaagaaagagccggctgtcccgctgaaaaatcgggtgcgggaatccaatgtaaatgcggtgccacgtttttatagaataaagccgcaaaggcaattgataaaataaagctcgtcaagcggataaactgcaggataaaaccgcgttttaaccccagtaaagtccccatcaggagcaagattaagatgatgatatctagcatagttgttcaatccttttctttaagctgacgctccagtttttcacatttctcttgtaatttgacataatcgtgcaccacatttaccgctgtcagcactgcaagtttatttatatcaaggtatggatttttttcattgatttctctcattttatcatcaacaattccggcgacatacctcatatgggctctgctttcttcaccgacaatcgtgaagtgctggccgtaaatgtcaacggttgtttttgtttttttgccgtcagacaacgtttctcctccattccgcgagaatcctagttcttatcataacacgtttattaaatgaatggaaagacgagcctcccgctgttatgatacactggtatatacagcgaaaagtgtaaaaaaaggagattattacgtgtcccattcagtgataaaagtatcgttgtctgctattgaccaaatgaaaatgacgtacagcggttcacttacagcctctgttccgcagggagccgtttttcaggcaaaaccgcccggctgtaccattacagcatatcaatcaggtaaggtcttgtttcaaggaaaaaacgctgcggcagaatccgcgcgctggggaacagcagagcctcaggaaaagaagaaaacggccaaaaagccggctgatccccgctatgcccctccggcagatatcgccggaatgtctgttatcggttctgacgaagtcggaaccggagattactttggcccaatgacggttgtatgcgcgtacgtcgacaaaaccatgcttcctttaatgaaggaactcggtgttaaggattctaaagatttaaaagatccgcaaatcatcgagattgcccgaaacctgattaaaaccattccgtacagcctgctggtgttaaagaatgaaaagtataacagcatgcaggaaaaaggcatgagccaagggaaaatgaaagctttgctgcacaatcaggcgatcacacatttattaagaaaattggatggagtaaagcctgaagccattttgattgaccaattcgctgagccaggcgtctacttcaatcatttaaagggcagagacattgtgaaggagcggacctattttagcacaaaagctgaaggtattcacctggctgtcgccgctgcttcaatcattgcaagatattcatttttaatggaaatggataaactatcacgcgcggcaggaatgacgcttccaaaaggggccggtccgcacgtcgatgaagcggccgccaagctgatcctcaaaaaaggggcatctgcactcagaacctttacaaaactccatttcgccaatacgcaaaaagcgcagcgccttgctgataaaaaacgttcatagaaaaaagcttgcagatttctctgcaagcttttttatcagcctcttaaaacagcttgatatgtgtcttctaacgctttcagcactttgctgtgcgcctttgtcacttcttcttcagtcagtgtttgttcaggattgacatactggagtgagaaagcgactgacttcttgccttcctccatatgctctccttcgtatacgtcaaatacggttacctctttcagaagcttgcccccggcctctttaatgacgctctcgagctgtccgcttgtgacggttttatctgttacaagagcgatatcacgtgtcacagacggatattttggaatcgccgtgtaaacaagcggtgctgtttctgctgcgagcaacgcatgaagatcgagctcaaatacgtatgtttcctttatatccagttctttttccaatgaaggatggacttggccgatgaagccgatcagagaaccattcaataaaatgttcgctgttctgcccggatgcagctgtttgcgttcagactgtacaaattcaatgctgtctaggacgttgagtttgtctaacagcccttccacaattcctttgacaacaaagaaatcaactggtttcttttcaccctgccatagctgcttgcgccataatccggtaacagctcctgctacgcgttctgtttcaacaggttttgtgtcctcttccttcgttaggaaaacggagccaacttcgtacagtgcaactgagtcagtctgcctcgcaagattgtaagaaacagaatcaagcagatttggaacaagactgtgtctgagaatgcttctttcttcactcattggaagcgcaagcacagtattcagtgatttttcaatcgcaaacgctgtcgctttcttctcgtttgtcagtgagtaagtgatggcttgtgataagcctgcgccttcaaggaagcgtctgactttacggcgttttgcctgatatggcgttaatccgcctgtagttcccgctgtctcaggaagcgtagacggaatgttatcgtagccgtacagtcttgccgcttcttcgattaaatcctcttctattgtaatgtcaccgcgccgtgatgggacagtcacaacgagaagatcatccgcttcaccgaccgtaaaaccgagacgtttataaatgctgatcagttcttctttactgatcgtcaggcctagaacgctgctcactttgtcagcagatacgtgaatgttatttgcttcgattgtcaggtgatcttcctcaaccgttccagcaagcacctcaccgccggcatacagatggatcagctgcgcagcccgttctgctgcaagacgtacgcgtgccggatcaattcctttttcaaatcttacgcttgattcacttctcaaaccaaggtctttggaagccttgcgaaccttctgcccgttgaaatacgcagcctcaagcaaaatggttttcgtatcttcctgaacctctgactctgctcctcccatgacaccggcaacggcctgcgctttcgttccgtttgtaatgacaaggtgatcggcagacagcttacgttcttgatcatcaagtgttacgatcatttcattctcagctgcttttcttactacgacttccttagagccaaatctgtcataatcaaacgcatgaagcggctgtccgtattccaacaggacaaaatttgtgatgtcaacgacgttgttgtgcggacgaatgcctgcattcatcagctttgtctgcatccaaagcggtgacggagcaatcgtgacatttttaatgatttttgcagtgtacagcgggttcgcttcttgatcttcaattttgactgaaatgtaatcagacgcttgttctgaagcagccgggtaatccgtttgcggaagctttacctcagtgtctaaaatcgccgcaacctcgtaagcaacaccaagcatgttcatggcatccgcgcggtttggcgttaaacccagctcaagaatcgcatcgtcaagctgtaaagccgctaaggcatcgcttcctgtttcagcgtcattcgggaatacgaaaatgccttctgcatactccttcgccacaagtttgctttcgataccaagctcctgtaaggaacagatcatgccgtttgattcttcaccgcgaagcttggcttttttgattttgaaattgcccggcagcaccgctccgactgttgcaactgcgactttttgtcccttatccacattcggcgcgccgcaaatgatttgtacaggggcttcagctccgatatccacaaggcacttattcagcttatcagcattcgggtgctgctcgcgctccagcacatggccgatgacaacgcctttgatgccttctcctttgtattcaattccttcaacctcaataccggctcttgtaattttttcagcaagaacagccgggtccatgccttttaaatcaacataatcctctaaccatttataagaaacaaacatccttgcatcctcctcttacgcctgtttaaactgcgaaataaatctgacatcgtttgtatagaagtggcggatatcatcaatgccatatttcagcatcgcgatgcgctcaacacccattccgaatgcgaagccctgatattccttcggatcaaagccagccattttaagcacgttcgggtgaaccattccggcaccgaggatttcaatccagcctgttcctttacatactgagcagccgttcccaccgcatttaaagcatgtcacatccacttctactgaaggctcagtaaacgggaagaagcttgggcggagtctgatttcacggtcttgcccgaacatttttttcgcaacaagttcaagcgttccttttaaatcactcatgctgatgtttttgtcaacgacaagcccttcaatttgcataaattggtgagagtgcgtcgcatcatcgttatcacggcgatatactttacccgggcaaatgattttaacgggacctttgccttcatgcttttccatcgtacgtgtttggacaggagaagtttgcgttctcatcaaagtttcctctgtgatgtaaaagctgtcctgcatatcgcgcgctgggtgttctttcggaagattgagcgattcgaagttgtagtaatccgtttcaacctctggcccttcctcgactgtgtagcccataccgataaataaatcttcaatttcttcaatgacaacagtgagcggatggcggccgccgactgcaacagggttccccggcagcgtgacgtcaattgtctgtcctgcaagcttctgtttcatttcctcttcttcaagcttctcgtttttgtcagcaatcgcattggcaatacgctcccttacttcgttcgcgagcgcccccatttttggacgttcctcagcagaaagcttgcccattccgcgcagcacttctgtaatcggccctttttttccgagatattgcacccgaatatcattgacaaccttcaatgagcttgccgcttctacttgttctaaagcttcttgttccagctgttttagcttttcttccattttgcatcctccttttatgtaaacaaaccgtcatatgtctttggaaaataaaaaaaacccgtcccttgtacaagggacgagttgtggccgcggtaccacccttatttcagacagactgatgctgtcgtcagcttcattgacataacggaatcagattccggttcacctttacgcgcagtgtacgcggtcccggcgacaactcaagaggtgaagccaatttccggctgcgttaaaaatgctctcagtcagcggcattttctccctggaaagcagttgatcagaaattgaggtcctctgtcacggtttttgaaatattatgttctattatagagaaatccaacgcttggcgcaacactatcctcgcaagtgatacacgaggatggcagccgcaaccgcaacgtttagtgattcagcctgtccgtaaagcggcacgtacaggttcaaatccgttttttccagcaatgcagcatctacccctgcaccttcatttcctacaatgagcgcaaaggattcagactgaggaatctcctggtaaggcgctccgttttgcagcgccgtgccgtatacttttacgccctctgccttcaattcgtccacatatgaaggcaggtttcttctcacaacaggaatatggaagtgagatccttgagcagatcgcagtgtttttccgttaaaggcgtccgccgtgccgtcaccgagtacaaccgcatccaaaccggccgcatcagccgttcgaatcattgtgccaaggtttcccggatcttgaacagcgtcaatcagcagcaccttgcgtgccgttgccagcttttcttcaggcatatggcacacagcggcaatctgctgcggcgtttcggtttcagtcacagctgaaaacgcatcttcactcagcatatagcactggataccagtctcaagatctgaaggaatcctcgtttcatcctttacaaggatttctttcacaatgcccgggcttttcaacgcctcttcaacgaggtgttctccctctatcagaaatgtatttgtttttgttcgttctttttttgtgtgaagctttttccaatccttcactttttggttttttgccgattctatttgtttcactgtctatgtggcgctcctttttttaacatgatgttattatatcgcaagaacagcacataataaaccaggtgcagggttagaatatacgtattacattttagaaaaaggagcgttttacatggatcttaatttacgtcatgccgtcattgccaatgtcaccggcaataatcaggagcagcttgagcatacaatcgtagatgcgattcaaagcggtgaagaaaaaatgcttccagggctcggcgttttattcgaagtcatttggcagcacgcatccgaaagtgagaaaaacgaaatgctgaaaacgcttgaaggcggattaaaacccgccgaataagacatgaaaccgggtgacagcgcccggtttttttcttatataataaaaacatgatgagggggaacgccatgtttttacagccgttattagcgaaaaaaattattgctgaagttaaaaaaatgtacgaacgtgaagtcattattgtaaacacggacggtcttattatggcaggcacaaacgatgagcgtgtcggacaatttcatgagggagcgcttatctgcgcaaaagaaagacgcagcgtgattattacaaaagaagatgaaacaaggttaaaaggagtgaaagcaggcataaacctccctgtattttttgaccatgatgtgattgccgtcttcgggctgacaggtgagcctgcagagattcagccattcggagaactgcttcgaaaaatgacagaactgttcattaaggaatcgcggcacttagagcaatcccagtggcgtgagagaatgctggagtcctttatgatcgattggctgcaattaaaggagtggtctcccagttttcttgagaaagctcagcttcttggtgttgacctttcttcccggcgccaaatgattcttattcaggggtatgagtggtcacctcatgatattgaacaaatggcacgcagctggaaatcctcgtaccctgcggatttgttcatcaggtggggaaatgaacggattttgattaatcatgaagtgccgcagcatgaacaaagggatcggcttttgcggaaaatccttcacatttgttcgtttgccaataccgcaagcagccaatatacagcagctggcgccggaagggctgtcgcaagctccagcctgacagattcatacgagcaagcggaaaaagcgctggctgtcagccttaagcgaaaaacgcccatatttgaagaggatctgaagcttgatatgtgtctgacggagatcagcccgggaacccgaaacgaatttccgcaaagagtattaggaaaggcgctagagcatcaggaacttatgaatacgatacggactttctttcatcacgatttgtctttgaaacaaaccgctgaagacatgcatatacacatcaatacattgcgttatcgtctggctaaggctgaacagctgacgggattacgttttgaccgtaccgaggacgtcgtcacgatgtacgtcgcactctattttttagatcaagatacaaaatagagagagtttcagtttcattttttgtatgtttctccatggaaggctttgctttttttcttttacaatagattgaaagcgttttttgacagggggatgggtgaaatgatcaccaaggatgtaaaggagcagctgattcaggtctccggaccagaaaactttgatgactcgaatgccggccgtctcgtctattcatatgatgcgacgcctcagtatcagtctatgcctgatgccgtgattgctccgaggaatactgatgaaatatcacgcattttaacaatttgcagcgaacatcgagtgccgatcgttccaagaggatcagggacaaacctgtgcggcggcacgtgcccgactgaaggcggacttgtgcttctctttaagcacatgaaccagattcttgaaattgatgaagaaaatttaactgccacagttcagccgggcgtcattacgttggatatgatccgggcagttgaaagcaaaggtttattttatccgcctgacccgagttctatgaaaatatcaactatcgggggcaacatcaatgaaaattccggcgggctacgcggattaaaatacggtgtcacccgcgactatgttattggactggaggttgttctcgcaaatggtgacatcatccgcaccggcggaaaactcgcaaaggatgtggccggatacgatctcacacgtctttttgtcggctcagaaggaacactcggcattgtgacagaggcaatcgtcaaactcgttccaaagccggaaacaaagaagacgctgcttgccctttatgaaaacatcgatgccgctgctcaaacggtatcggacattattgccgcaaaaattatacccgctacgcttgaatttctcgatcagcctacactattggtgattgaggattatgccaaaatcggacttccgacaagcgcaaaagcagttctgttaattgaacaagacgggccatttgaaactgttgaacgggatatggaaaagattgaggcgatctgcaaaaaaggcgacgccgtatccgttcagaccgcacaaacagaggaggaagcgtttgccctgactgaagcccggcgttctgcactttctgccctagcccgcctcaaaccgacgacgattttagaggatgcgaccgttcctcgctcagaaatcgccaatatggttaaagcgattaatgatattgctgctaaatatgatatttccatctgcacctttggtcatgcgggagacgggaaccttcacccgacatgcacgacagacataagaaataaggatgaaatggaacgtgtcgaacaggcttttgccgagatttttgagaaagcgattgaacttggcgggacgataaccggagagcacggagtcggggaaatgaaagcgccttacttggaaatgaagctgaaaaaagaaggcattgatgcgatgaaagcgttgaaagcggcatttgacccccggaacatattaaatcccggcaaaatgtttgcgaaagatgccagaaaacgtgtggtggcggaaagatgacaacagaaaaagaaatgaaacagatccaaaatgaatttaaagagcgtatggatgaaggagagttattaaattgtatgcgctgcggcttctgtcttccttcctgtccgacctatatcgaatcgggatttcaggaaacacactctccgcgtgggcgcatcgccttaatgaaagccgtagccgacggtatgattgaaccggatgaagatgtcgaacggtcgctgtcactttgcctcggctgccgcgcctgtgagcctgtatgcccgtctggcgtgaaatacgggcagctgcttgaggaagccagagatattatccaccaaaataaaaaacactctcttggtgaacgtgtcatgcgaaagacggcttttcacgagctgtttccgcatcaaaaccgcatgcgctcagctgtaagccttatcggtttgtatcagcgttcaggactgcaaaccgctgtgcgaaaatcaggcatgcttcgggtcctgcctgagcatttgcggacgatggaagctgttcttcctgatgttccaaaaagcaaagacatgaaacatcggccgcgtttcctgccttccattggccccatgaaaaaacgggtcgcctttttttcgggctgcttaatggatacaatgtttttaccgaccaataacgccacattgaagcttttacagctggcaggctgcgacattgtcattccgcctgaacaggcttgctgcggggcgcttcatggacacagcggtgaaaaaaacacagggaaagagctcgcgaaacaaaatatcgctgctttcgaagcattagacgtggatgcagtcattacaaacgcaggaggatgcggagcctttctcactgaatatgatcatttgctgaaggatgaccctgagtggtcggaacgggctgccgcttttgttcaaaagctgaaggatttttcttctgttttggttgaactcgatttccatcaaatggatctagcactcgagacgcctcaggtcgttacctaccaagattcatgtcatctaagaaatgtgatgcatacgtcactcgagccccgccagcttcttaaaagcatcaaaggggcggaattcaaagaaatggagaaagcagacagctgctgcgggtcagcgggaatttacaacatcgtcgaagttgaaatgtctatgaaaatactggacagcaaaatggctgccgtcaaagcaaccgaagcgatcctcattgtaacagcaaatcctggctgcctgctgcagatgaagctcggcattgaacgcgaaggactaagcggtaaagtcagagccgttcacctggctgatttgctattagaagcagccgggcacaaaacatcatgagaaagcccaaaacagacattgttttgggcttttgtgcgttattccatcggactgcaaatttcgatataatgtccatccggatcagcgatataggcgaccgtctgcccccatggtttcactttcggctccccgataatcgatacgccttgttctctcatccttttgatgaccgcttctacattttcagtaacaaacccgatttcaaatgtgtttgaagcagatgtatccggaatgtccagcgccgtgatgtctctggcgctttcccgggtattaagcgccaatatcgtagaccctgtatcaaattcgacatacgtgccgtgttcagcacgaatcggcagtcctaaaatatcccggtaaaaaatgaatagcccgcttgctgtccgatacgtatagaataagatatttcattgatagattcattgccaacccctctcagcattttcaatagtccttctagcccggtatagatgcttccatccttaagctcggatctttccacatctgcgcccattttttcacagccgccacgataatgatgaagcctaacaccagcatgatgatagataatacgccattcaatacactatatcctgctgcttcaggattgagatacacattgcgcaccatccaatagcccgcataattgacagtgacatataaataggcaagcgggataaggcaagtcagaatgtaccggcgtttatcggcgattttcagcacgatcgtcgctccgataatcagccccactgaagccatcagctgattagaaacgccgaagagcgcccaaatggaaccgatatctcctgaatacagcaagtacccccacatcaaacaggcaagcgcgctggcaaatacagagcccggaatccagtctgttttcttcagcggcttatacacctccccgaagaagtcctggatcaaataacgggcgacacgtgtgccggcgtcaatcgctgttaaaataaagaccgcttcaaacataatgacaaattggaaaaagtatgaggccaaatggctgaaaaacggcattccggtaaaaatataagtcatccctaccgcaagcgtgacggctccccctgttcttccttctaagtccaaaccgatttccccgctcaattcaggcaaatgtacgacattcatgccaagcgtacggaaaacctcaggcgtgctgttaatcgcaaagtaatcagcaggctgtaaagcggtcgctgcaatcagcgccatgataccgacaagacactcaacaagcattgcgccaaacgcaaccggcttcatatcactccatttattcagcattttcggtgtcgttcctgagccgacaaaggcatggaacccagagatcgccccgcaggcgatggttattgagatgaacggccagacaggtcctgccagcaccggccctccgccttttacgaattctgtaaacgcagggaacggaatggacggattgacgacaaacacaccaacaatcaaagcgataaaaacaccgattttcataaagctgcttaaataatcacgcggagccagaagcagccaaacgggaagcgcagccgcaaaaaacgcataaacaggaagcgcgattgcaagcgttttcgtatctagcgttaaaaagtcaccgagcgcggtagtctgtacccatggaccgataaagactcctgccattaaaaagagaaagccgaccgttgaagcgagctttaaatttcccgttttcttataaaataagcccacacccatcgcaatcggaatcgtaatccccaccgcaaatgttccccatggattacgttcaagcgcatgcaagacaaccatcgacaggcccgccattgtgatcgtgatgataaacagcatggacagtcctgtacaaaatcctgcaacagggccaagctcatccttcgccacttccgacagcgattttccgtttttgcgcatcgatgcaaacaacaccacaatatcatggacggctcccccaattaccgccccgattaacagccacaataatcccggcaaatagccaaactgcgccgccagaattggtccgaccagcggcccggccgctgcgatcgcggcaaagtggtggccgaacgaaacccatttatttgtaggcacatagtctttcccatcctcaagcgcatgagcaggtgttggcttgtcatcattcactttgagaaccttcaccatcataaatgttccgtataaacgataggcaatagccaaaatacacattgatgctatcacaattgtaaccgcattcattttctcccatccccttttctgtttttcataaatatatcataatttcatggtgaaaagcggtcattttttcctatacaaaaagccggctggaatgggccggctcgtggcagttgaaagacaagccggagagaaatctccggctttgctattcttatgactgttttttcaggcggatcacattccaggaaagcggcgtgaaatgagcagttaagccgttttcgctgacagacgatgatccgttggaatgcggaacgacattttttctgttatgctggtttgttgctttgatatcctgatgctcaagtacgatgtgctctgcgatttggtaggattcaaagcctctgagcgaaatctccgtctccatctgatcctcagccttgtttaccgcaaaaatagtgagtgtttcttcctcttcagagtacacaacagcagcatcaacatatggcacatcagtgaaatcagaacaatcgtacttaggagaagaaataagcggtttcagtgactcgccccttccgtaaacagaagcatgcatgtatggatagaaaatcggctgtctccatgcttctccgcctttttccgtcatgatcggcgcgatgacattaacaagctgtgcaagacacgcaattttcacacggtctgcgtgctgcagcatcgtaatgagcagagagccgactaataaggcatcttcaaaattgtaaatatcctctaaaatcggacgcgcagtgatccacggctcgacttttttatcagcctcatttgagtggtaccagacgttccattcatccagagagagattgatagttttcttgctgcgtgtttttgcttttacatagtcacaggtcgcagcgactgatttgataaaatgatccaaatccatagaacgtgccaagtagtttggcagattgttatcccggtttccgtagtaagtgtgaagagagatatagtcgacatgctcatacgtatgctcaagcaccttcgcttcccaatcgataaaggtcggcataccgctgtttgagctgccgcaggcaacgagttcaattgatgggtcaacccacttcatgacctttgctgtctctgcggcaagccgtccgtattcatcagctgttttgtggccgatctgccatggtccatccatttcgtttcctaagcaccatgttttgatgccatacggctgttcatagccatgcgatcttcttaaatcactccagtaagagcctttcggatggttgcaatattcaacgagattacgggcggcatctatgcctcttgtgccaaggttgacggccatattgacctcagtgttcaccttttttgcccaagataaaaattcatttgttcccacttcattggtttctgtcgtttgccatgccaagtcaagccgtctcgggcggttttcgactggtccgacaccgtcctcccagttgtatccggataaaaagtttccgcccggatagcggatgatgggaacctgtaattctttgatcagcgactggacatcttttctaaatccatcttcatccgcttcagggtgatcaggctcgtatatgccttcatataccgcacgacccatatgttcgataaacgagccataaatccgtttatctacttcaccgattttatattctttgtctacaatcattcgcgcttttttcatcacacgtttcctccttcattaacctttgactccccctaccgtcaggccggagataaagtacttttggaaaaacaagaaaatgataatcaccggcaaaatcgcaaatactgagccggatataagcatgtcgtaattatttccataagggctcagcaagctggacagccctattggaagcgtaaacatttctttcgaccgaagcacaatcagcggccacaagaagttgttccagctgtttaaggactgaaggataatcatcgcaccgaaagccggtttcatcagcggtgccataatcctgaaaaagatgccgaattccgtacagccgtccatccttgcagagtccagcagatctcttggaaggccaagagcatattgcctgaaaaagaaaacagcaacaggtgaaacgataaacggcaatatgacacccgtatatgaatcgatcaagtgcagtccgacagtaagtttaaacagaggaagcatcatcacttccagcggaaccatcataataatcagcacaagaacaaagatgatatttctgcccttaaaatcataaaccgcaagcccgtacccgatcatcgaagaaaaaaacagagtgagcacagtcgtaaaaagtccgagtacaagactgttaaaaaaccatttgaaataaatgctgccgccattaaacagaaatgtgtagttatcaaaactcatcacttttggatcaatatcaagattcagccccacacgcaaaagctcagatgacggctttaatgatcctaaaagcaaacagaaaatcggaaaaagatacaataggctcagcatcataaaaaacagggtcagcgcaattctataaacgctaaactgaggactgtgccgcaacatttatccctcccccttaaacgagcctgacagctttaatgaaatcaggctgacaacaaggatcacaatcaaaagcacaatgccgatggccgctccgtatcccatttcattgtaggcaagtccctgctgatacaaatatccgacaagcgtcagaccaatattacccggggaattattctgccaaaggacgtagctttcctcaaacatcctgaagccgccgatgatgctgatggtcagcacatatacggttacaggcttgagaaacggcagcgtgatgtgcagaaattttttcattgtattcgcgccgtctatatcagcggcttcgtacagctctttcggcacattttgcaaacctgctaaaaagtaaaggatgttgattcccatccatctccatgaagcaagcagcaccatcaaaaacatgccggtatgttcattgttcatccagttctgaggtgaaaagccgagtttaagtaggatggaattggccagagacgtttccatttctccgaagatcagccgaaaaatgatccccgcgacaatggttgaggtcaatgccgggataaataatgctgatttaaatatatttctaaatttgaccagctttgaattcaggaatatggccagaagcaatggaacaggaatcagcacgatcagcgtccaaaaggtgtattccagcgtattccaaagggcggtatagaacgtcgggttgtttagcgctgtataattagacaatccgacaaaggacacctctcccggcaaaattctttggaagctcatgatgaagacactaatgatggggtatagaaaaaatacgagaaaggataaaacgaatggcgctgtaaacagatagggcgccgctttttttgaataaaacagatctcgccagcctgattgtttcgcagctgaaggaacgggatgaaccgttcccgttttcacaggtttcatgagaacctccccgctttcactttttgaatgggattctatttctgtttcagttcacctgccgctctgtccaaggcttgtttaggcgttttttgctgagatttaagcgcgtcgaacaatacgcttctgttgacaaggtctgaagccttggcaaaatcctcatgtaaataaattggattgatttcatccttgatatcgagcagcacagaaaaaatgcctgttccgttttggaagtaatccgtgtatttgtttttctctttcaattccttggagctccaaacatcccagcgaagcgggtcaaagccgagtacgctccagagttttttatttccttcttcagagcccttcgcaaaggccaaaaactcttttgctaactcaacatgcttggattgcttcggtacaacagttgccgtaccgcccaaacctgccgagcggtcgcccccctctttccatgccgggagcggtctgatggcaatcttccctttcagatcaggcatataatcgataaatcttcccatataccaaatcggcatgagaactgaagcagctcctccttggttcataaagccgtagtattcttcactgtgatgcccgccgcccggcgcaggaatcatcgttttatcattgatcatgtcttttaaatattgaagtgtttttacgttggtgtcattattgaggatcagcttgccgtttttatcaaaatagcctgagttttgctgtgaaatcatagataagaacgttgcggaatcatttgtttccaccgttcccatcggcttcccggtcactttgcgcactttctgtccggctttatggtaatcatcccatgttttaatatcgtcaggattgacgccggcttttttcatcacatccatgttataaaacatgaccgttgtccctacatgtgtatcgagtccgtaaagctttccgtttttgctgtacaatgtcagccgcgcctcaacgaatttatcgcgatccttttcaatcagcggagtcaagtcggcaagcggtatgtcagagcccttcaaaaagtttgaaaaacgggccaattcgacatctgcaatatcaggaacgccttctcccgctattagggagatagataagttatcgtgcatttgtccatatggataaacgaccgtattcagcttaattttgcggtcaggatattttttgttccattccttcaccatttccacatagaactgctcatgaagcccgttaaatgtccaaaaggtcagctcagtttcacccgatttgccggatgatttttctgctgaacacccggcaatgactaatgtcagcaacatcatgagcacaagaaaacagacagtcatttttttcatctgcgttaccccttccattcgaggtgcgggctattcatatagaccatggttgatcagcgttttgttttcattgatgattcttaatccggtgcatcggtctcttaaggtgtgcgcgtgtctgaaggcatttttgacggaatcctgcccgacaccgatttcgtcaaaatacgcagggcctccggctgatctcagccaatcagccagcacttctcctctcgggagtgtttgataagccgattggatggcttcccggcggcttggtgaaaattcgttcagcccgtcatcctgagcgagctttctgtatgtgtcagttaataaaacagcggcacagcccacctttgccccatgaagaatctgaggccgttttttctccattaactccatttcaatccaatgtgaaatatgatgctcgccgcctgatgccggtcgggaatgatctaatgccagcatgacaagccccgatacaagtaaagactccatcaaaacccgtatgccagtttccgttttcatcgcaatgtcttctgtgtgttcaatgcaggcagcaagcgcctcctgaacgatcttagctcctgcaggcgaataaggctcaccggcaagatgccgggatatttcccaatctgctaaagacgtgattttaccgagcatgtcaccaaagccagccgccaccattgactgcggtgccgcttttaatagatccagatcagcgaacagcgcagatggggccttcgtttgaatggttgttttcgtgccgtataaaataatcggcgcaccggctgatgtaaaaccgtctacagatggagcagtcggataagaaataaacggcaaatctctttgaaacgccgcaaagcggacgatatcatgaatcgtgcccgaaccgactgcgatcatgacatccgttggttgtttcgtatggatcagcacatgaatgagcgatcgttcatcagctgtcacatctccggcttcattttctggaatgatcaggcactcggcctgaaatccttcttgattcagtcggttttctaaatcaattcctgcaatgcggtgtgtattcgcgtcgcagacaaggacaatatgttgattgttttttcgttttacataatccaaaagcgaatcagctgcttgcttaccgagaacaatttcttcaacttttataggcaacgtcttttctccggcgttttcaaaagcacgctgaacgtcagctgcgatacgattcatatcagaatcccctcctcagccaatttggttacatccttaatagaatccagcacataatccggcgtgtacaaacgctgttcaccctgtttcgcagaaccagttagcactaaggcgcttttcatgccataaagcttccccatcgcaatgtcagattcaatgctgtctcctataatcatgcattcatgtgcggacagccccattgctgtacaggcagcctccgccatcagccatgacggttttccgacaacaagttcagtcttcgcttgtgcagaagtctcaattgccccgatcattccggccacatcaatggcatttccgtcttcgttcggaaaagagcggtctttgtttgtagcgataatacgagcgccgccggcagccgcttgaaaggcttgatttaaatcgtcgtacgtgagcgtttcatgaagggagatcacgagccaatccgcttccttcggttcgctcgcgttctgcacaccggccagcctcagctcgtcaaccaagccttgctccccaagcacccatacctttgaaaaacgataatgttttttcagaaaagccgctgtcacgcttgatgacagaacaatgtcgtttacgtccgtttcaatccccgcgccaagaagtttttttctgcacatggcacgggagatattcccccggttgcttaaaaagacgattttctttcccattctcctaagcgttttgatcgcttctcttgctccttcgatcaactcatttcctctgaatacagtaccgtccaagtcaatcagaatgccagccggtgacacaggcgtatcatgactggccataatacgcatttgctccgtgttttcgataaaaatgcttttcatgcaggactgtattgattggggttacatccttgttcagcataatggagtgataggccatttcggcaaccgtttctaatacaactgcgttatgaatggcatttaaggcgtcagtgccccagcagaacggtccgtgattattcacgagcacacccggcacctgttcgtaattatgatgctgaaaggtttccgctatgacttttcctgtattcagttcgtagtcatgaatgatttcttcatcgtacatttctcgagtacatggaatcgcactgtcaaaataatcagcatgggtcgtgcctaacggagggatgtctctgcccgattgcgcccagcttgtcgcccattgagaatgggtatggacaattcccccgatattcggaaaggctttatatagataaacatgggtaggtgtatctgaagaaggtttaagcgagccttcgacgacctctccatcaaggttcaaaacaaccaagtcatcggctgtcaggtcgctgtattcgactccgctaggtttgatgacaattctttctttttcacggtcaatgccgctgacatttccccacgtaaaggttaccagctgatgctcttgaagcttcaggttggcagccagcacttctttttttaatgtttcaagcatgctccatcaccctttatcaattctttttggcggcagatgaaaattgaagatttttgatcgttttcagacgcttcatgacatggttttcttttccgaaataatgaaccagctctttatattcagcgtacaatttttcataaaccgcggcgttttcggcatttggcgtataagttatatctttcagttttcccatgttcgccgctgcctttttgatatcatcgtagccgcctttttctttgcctgctgcaagcgcgccgaaaatggcagatcctaaggctggggcttgcggtgaaccagagattttaatgtccatgtttgtcacatccgcataaatctgcatgacaaacgggtttttctcagctattccgccggctgcgaacagttcctcaatcggaacaccgctttctttgaatgtttcgataatcatccgggttccgtaagctgtcgcttcaactaacgctctataaatctcttcaggcttcgtcagcagtgtcatgccaagcagcatccctgttaaatctgcatcaacaagagttgaacggtttccattccaccaatctaaagcaagcaagccgctttcaccaggcgcttgatggtttgctttctcactcagcagctcatgaacgccaatgtttttttcctttgcttcctcttgataagctggcgggacacatgttttcacaaaccagtcaaaatgatcgccgacacaggactgcccggcttcatatcccgcatagcccgggagaattccgttgtccacaacgccgcacattcctggaacgatatgcacctcttcaccaagtagaacatggcacgtcgaggttcccataatcatcagcattttccctggctctgtaatgccgaccgccggtaccgaaacatgagcgtccacattggcaaccgcaacagccgttcccgggagaagccctgtcagctttgccattttttcagtcagactgccggctttttctcctactgaatgaatagaacctgacaatttgtcctttgtaatcgttttcattgaaggatttaatttctcaaagaaatcatctgacggataccccgctttttcactccacatcgctttataccctgcggtacaattgcttcgcttgagcgagccgcacagctggtacacgatccagtccgcagcctcgatgatccggtcagccgcttcataaatgtgaggcgcttcctcggcaatttgcatgacctttggaatcatccattctgatgaaatttttcctccgtaccgctgtaaaaaagcctctccttcttcttccgcgatttgattgagccgatcagcatgtttttgggccgcatgatgcttccagagcttcacatagctgtgcggctcctcttcatattcaggcagcatgcataacggctgcccgctgctgtcaataggaaggatcgtacatgccgtgaaatcaattccaatcccgataatgtctttcgggtcaacgcccgtctgttcgagtaaagacggaatggttgtttccaagacttcgaggtaatcagcagggtgctgcagcgcccagtcacgcggcagcttttgacccgtttttggaaggacggtatcaatgacagcatgcctgtattcttttacagcagccgcaagttcctcccctgtttggacatgaacgagcactgctcttcctgataaagttccaaaatcaacccctattgtgtaagccatgtgacatccccctctacttttgaagccggtaaagcgcctcgttccattttaactcgtgtttcagtttatgaattgtcgtatcacgggaaatgagaacactttcgattcccgccatttccgcccaatcaagcatttgctccgctgtcagttcataagacaggcaggtatggtgtgcaccgccggctaaaatccatgcctccgctgctgttttcaatgacggctccggcttccagagaacacgggcaaccggtaaattcggcatgtctttttcaatttcctggccgttgacttcattcagcacaaggcggaaacgcccgccaatatcaacaatgctagcttgaatggcagaaccgctgatgccgttaaataccaaacgcgcagggtcctctttgccgccaatcgaaagcgaatgaacctcgattttcggctgatccaaagcgacagtcggacacacttcaagcatgtgagagcccagaatcatttcatttcccggttcaaaatggtacgtgtaatcttccatgaaggaagttctttttcctttagccatgattttcatcatccgtacaagggccgctgtcttccaatctccttcaccggcaaacccatagcctttctccatcaggcgctgaacggcaagtcccggcagctgtttcattccgtgcagcacttcaaacgatgtcgtaaacgctgtgtatccgccttgctcaagaaaagcggttaatccaagttcaattttcgcctgttctttaatggacgctacctttgcttcgtcacgttttgtttcctcactgatcacatatagtctgtcatactcggcataaagcgtgtcaacctcgtcgtccgtaatgcgatccatcacttcaacgagatccccgatgccatatccgtcaacctgccagccaaattgaatatgcgctcccaccttgtctccgtccgttaccgcgacatgacgcatgttatctccaaatctggcaaccttaatatgtctgctttcatttaatgcagccgccgtatccatccactgggacatttcttttttcacttcttcatcatcccaatagccggcaatgacttttcggctaagccccattctcgagttgatgtaaccgtactctcgatcgccatgcgcggattggttgctgttcataaaatccatgtcaatcgtaccccacgggatatcgcgattatattgggtatgcaaatgcataagcggtttttgataagaggaaaggccttctatccacatttttgcaggggaaaatgtgtgcatccatgtaatgatgccagcacatgtctcactgtactccgcttctcttaacagctctctaatggtttccggtgaagtgacgacgggcttatgagtgattttatatctggaagaaatcccgctgagcccctcacaaatgcttttagcatgctgatctacgagttccagcgtctcttccccgtataggtgctggcttcctgtcacaaaccagaattcataatcctttgtctgaagcatgtaaactgcccctttctcataaaataaaacgctttcaaatacaaaagatacgtactaatgatagaaaataaacctataaataaatatttgtacgaacaattttattatagtaattgactattatactgtcaatcttttcttttaaaaaaagccgggggcagagcccggctttttaattcaataggacggccagcccgagctccaattcaaatcattgatgagaagctttggaatgccgttgtcattggcatcataggcatggcgaacaagaatgtttccgttcacaatatcctggcctccaggtcctttccattggtcattgcccgaatccaaaatggtgcctccgccttcaagcatgctttttccgcttttatcaagataagggcctgtaatgcttttggatcttccgtaagcaattttgtacgtactgtttaccccgtcacagcatttatcaaatgaaaccattaaatagtaatatccattttgatacgtaagagtaggagcttctaaggcacctccattattcggtctagctgcaatcgaatagagcgagcctgtaggcttcattgtactcttatcgagcttagtcagcttaatgccgctccaaaacgagccgaatgcaagccacgggttgccatccttatcgaatgtcagctccggatcaatggcgttataattatttgagcttgtcgaacggatcaccaagccctcgtccttccagccccccgaactgatgcttgttgaagatgccaggccaatggcagatgtattgcttccaaaagaagaaacggaataatatagccagtacttgccgttatagtattggatgtccggcgcccactggttttggccataattcggcacataattggaccaccacgatagcggtgtagtgaaaatggatttttgtacggtccaatttttagcgtctgaagacttcaaaacccgcagtccccgttcttcagtaagccctgttccgagcgcataccatgagctcccctctttaatcatagtcgggtcatgaagcagctcattggatgcaccccaaaacgctgcctctgcgggagcagcagaagtgaatatcaaacctgcagccagagctgcactcgaaaagtgtaagaagcgtttccatgtttttttctttttcaattttgttcaacctcctttattttagaaagcgcttacaaattagattatttatcctcccttcctgtcaaatcgactgcgtatcgtatatcgtcatgttcaggaaattttcggtatcccctttattgtagtcactatgctgtaatttgtacagacaaaaaaatagaatccacctcaataggcggattcttccgtatctttattggtacgtaatttcgtcaaccgtttttcggtctaacttcttaatgacttctgtaattaactttaccgcgttttcataatcatcacgatgcagcatggccgcgtgcgtatgaatgtagcgggttgcaatggtaatggacagcgcaggaacgccatttgccgtcaaatggatggcacccgaatcagttccgccgccggcaatggcatcaaattggtacggaatgccggcttcctccgcagtggctacaactgcatcgcgcaaacctttgtgagagaccatggatgcatcgtaaacgataatctgcgggcctttgcccattttgctctgcgcttccttctcggaaatgccaggcgtgtctcctgctatccctacatcaacaccaaacgcaatatcaggctgaatggtgtgtgcagccgttttcgctcccctcagcccgacttcctcctgcacggttccgacgccatacactatatttggatgatctgtgttttgtaagtttcttaacacatcaatagcaatcgcacagccgatgcggttgtcccaggcctttgcgagtaggaatttttcattgttcatgaccgtaaattcaaaatgcggaacgatcatatctcccggaagtacaccccactccaaggcttcttcccggcttgaagctccaatatcaataaacatgtcttttatttccactgatttttttcttgcttcaggagacaaaatatgaggcggcttagatccgataacccctgtgatttctcctttttttgtgacaatggtgacgcgctgagcaagcataacctgagcccaccagccgccaacggtttgaaaacggataaagcctttatctgtgatttgtgtcaccataaagccgacttcatccaaatgtccggcgatcataattttcgggccgttttctgcaccagttttttttgcaattaaactgcccaggcgatctgttgtcacctcatcagcaaatggttctatgtatgatttcatcacttgccttacttctctttcattgcccggtatgccttttgcatctgttaaatctttcagcatggtcaatgtttcatctaattttgccatgttccaaaccctccttcatcagtcctgcattcttattatacaaaacatggcgctaaccatacgactatttcacttgaaaatcgggtatatgtttttacagctttcttttagaaaaagtgaaacctttttctatgcttttcgtattacatcagatcatcaccataagggaggtgccttcacacaatgtttgtcatggttctaaggattattttgcttgcactttttgcttattgtatttatgccgtggtcaaatatgtcgcgaatcctaagagaaggcttaagctggcccaatcaaaagaacatttttatattattgatgaacaaaacaatacccggaagaattttcagctgacgtataaaggcgtgctttttgagggagaaaagcatattccttccaaggatcatccgctgtttattcacacgatctttgtctggacagaatctcctgagaagctgaaacatttctctgcaaaagattttgagaacattgaagaaaaagtgctggaacgatatccaaattgtaagattgactgggaccagcccattaaactcgcaaaaaaagcagaagagcgttaaacgcttttctgctttttataaatcaaacgggctgtagtaaatagcgatgagaatcgcttctattaccagaagaagcggtactccgtacttaaaagaagcgtgtttcgttttatgtctgaaggtttgcatgccaagccagacaccgagcgctccaaacacgatggctatcagccacagccggtcttcagaaattctccacttgtgctgctgcgctttgcgtttgtcaatgcccatcacccaaaaaccgcacagattaatcaacaccaaataagcagcaataatcatgttgcctcatcctttatatagaaaaagccgctctgctggagagcggctctatatgattacttgtttaattgagctttagcagcatcagcaagctgattgaatgcagtaagatcgtttacagcaagatcagcaagcattttacggtttacttcgataccagaaagcttaagaccgtgcattaaacggctgtaagaaaggccgttcatgcgagcagctgcgttgatacgagtgatccaaagtttacggaaatcacgttttttctgacgacggtcacggaaagcatagtttccagatttcatgacctgctggttagctactttgtataatgtatgttttgaaccgaaataaccttttgctaatttaagaacctttttacgacgcttacgtgtaacagttccgccttttactcttggcattgaatttccctcctaattgttccttatccgattacttgatgttagcaagcatttgtttgatacgtttgaagtctcctgcgcttacaacagcactcttgcgaagcttacgcttttgcttttgagatttgttggcgaataagtgacttgtgtacgcgtgagaacgttttaacttcccagaacctgtctttttaaaacgtttagcagatccgcggtgagttttcatttttggcatgggatttcctccttattgcttttcgtttttcggtgcgagcattaagaacatgctgcggccgtccatttttggttttgtttcgactgtcgcaacctcagcacatgcttcggagaaacggtctaatacacgctgaccgatttctttatgagtgattgcgcgtcctttaaagcggatagaagctttcactttatcgcctttttcaaggaatttaatcgcattgcgcaatttcgtgttaaagtcatgctcatcgattgtcggacttaaccgaacttcttttaagttaatgattttttgattcttgcgtgcttctttttcctttttctgctgctcaaatcggaacttaccgtagtccatgattcggcagacaggcggttttgcattcgctgcaactaacacaaggtcaagatttgcgcggccggcgatttcaagtgcttcctgacgggacttgattccaagctggtcgccattttgtccgattaaacggacctcacgtgcacggataccctcattaaccaattgatctttgctaataatgagccacctccatagtttcttcgaattgattcacaactcattttgaatgcattttgcaggcaaacaaaaagtgtgggcattataaaacacccacactacgaacatctgtatcaataaaaatgtacggtcaacctgccaactacatgcatgtgtcaatcaggtgagaagcgggtgcttctgcttgtgatttatattcaattcaataactattctacacaataccggatctttagtcaaggacgacttatccggaacaacttttacattgtaacatgggttttctatgagcgcaagagagaaaaagaaaatctttcatccccacccagaatacaaagaaccaacaattcccccttattacgcaatttacaacaaaaccaccgacaggaagaaatgtaaaacaaagttaatctctgaccgatataaggagcagaagggagcctgacacatgaacaaactgatacagcttgctttatttttcacattgatgttaaccggttgctcgaatagcagcacatcttccgaatcaaaagtcgaaaccactgttaagacaacggcagcatttcctcaaaaggagctggagaaagagctaaaaaaactaaaacccgtttcattggacatgaagttcgagagtccactcgctaccgagttaggaaagcggaaggcaaaagaggaagctgaaaagcaaagacaaatcgccgctgagaaaaagcttgaaaaagagcgggaggcgaaacgaaagaaacagcaggaggaaaaagcggagagacagcgattagcagagcagcaggctgcagagagacagcgattagccgaagcggaaagacaagctgaacttgaaagacagcggcaggcagcaatccaaaaagagcagaaagcgaacgctgagaaaaagcggcaatcgcaggcacaacggcagcagactgaggcaccctcatctaatagtcaagatccaccatcttcctcgagtcagacagataaaaccattcaacagccagcttcagagcttcctgatgacgatggttatggttatgaagaacgaaaaaagtggcatgacgatcaagtagaatggggcattaaacaagggtatatcgatcccgaagacgcaccataaaataaaaaaagccaaggcattcagccttggcttatcctccgatcagctgcacgaacacagggatgaccagaaccgttaccactcctactacgacaacagcaatacttgccatcgcagcttcaacttctcccatctcaatcccgaccgctacaccaagtgcatgtccggatgttccaagagccaatcctttagaaatcggatttttcactttaaacaccttcaagaacaatgctccgagcgcatatacgatgacagcgttaaagatgaccgcaaaggctgtgatgtcgctgatgcccccgatgccttttgataaaggaagcgcaattgccgttgtagccgcctgcggaagcatgcttttcattacggccgaatcgagatgaatgcctttagcgagcagataaacaatcgtgacagagcagatagagccggcaataatggaggccatgatttgccaccagtactttttaagcttatctctttgtttgtacaaaggaattgcaaatgcgatcgttgccggttcaagaaaaaacttaatgatctctcccccgttattataatccgcgtaggaaaaaccgccgatttttaaaaatgcgatccccagcaccatggcaacaaacaaaggagtgaaaaggaagaagcctttcgttttcttaaataaaaaggtgccgatgccgaatgcagcaagtgatacgacaatcccaaaataaggactcattgtgctttccatgtgaagaacctcctgtttcccttaatggtgaacgagttcgttattgttctgcgggctttgcactgtttttgttttcatgtccgcttcggttttgcgttttccgctcagcgacagaatcagctgagaaaacaatcccgtagcccccagcaaaataatcgttgcgagcagaatgacaagaacaatttgcaggccgtattgctgcatcacaccaagcgaattcataacagatatacctgatggaacaaataaaaatccgatcagagaggttaaagacgttccgagcgtctccacttgttccagtttaatgactttcaaacataataggagaaataataagaccaaccctacaaccgatgccgggataggtattgggacaatagcggcaatcatatttgaaaccagcataatgacggcaaaaataaatgcttgtgttaaaaacccgtacacttttttagcactcattttcttcacctctttctctttggtaccctcattataaataagaattccctgttataaagcgcttacaagataacatgccgtatagcgggtctgagttgcagaatcaaatggctgaaatgcaaaaagccgcccatcaaatatggagcagctttttcaattccttcgcatatgtccggctgaccggtattttcgatccgtctttcatgatcagattatacgttgaattaaaccatggctgaatttctttaatatattcagtattcacgacaaagctccgatggacgcggataaaatcagaatccggcagctttttctcaatcacaacgagtgtatcgctgaccgtataagaatgatcgaaggtttttacattgacatgaccatcttctgttccggcatagataatgtccttcgtatccacaatcacaatcgattcccccacagatagcgcgagcttgtgctggccggcatggctgttttgctctgtttctacaatatcccgattgacttttttatattttttcagcgtttgctgaattctttcttcatcgaaaggcttggttaaataatcaagagcgtccacctcaaacgctttgagcgcatactggtcatacgctgtcgcaaacacaatagcaggaggatgcttcattttcttcaatcgctttgcgatatcaaaaccgttttctccggataaatcaacgtctaaaaacagcaaatcaggtttttgatccatcatttggtcaaaagcggattcgatattttccgcttcattgatttccatttcatcattggtccgcttaagcaagtaagccagttcatcccttgccagcatctcatcatcaactattaacaccctgagcatgttcttctccctctttcatctgttgcattggcacttgaaaggaaacctctgtccctttatgaacctcactgctgatatgcagtgcagcctgctgtccgaataaaccgatcagccgctgatttaggttataaagcgctgtaccggttccctccttagacggaaacggtttcttccccagttccggcaagacgtccggcggaattccgcgtccgttatccgccaccttcatatagacggatgcatcatcagataagacacagactgtaaccttgcatatgtcttgttttttcggaaacgcgtgccgaagcgcgttctcgacaagcacctgcaaaacaaacggagggatttcaatctgctccagtctgctgtcgatattaagctcaattttatatttcccgggaaaacgcgcctgttctaatgacaaataggcgttaagatggttcagctcctttgagagcggaatcagcagctgtctcgctccttgaaggtttgaacgaaaataaacactgagctgcaataggagcttacgggttttttcaacatctgtacggcataacgcagaaatcgtgttgatcgcattaaataaaaaatgcggattcacctgtgcttgaagcgctttaatttcagcatccttgagaagtttgctttgcagctctgcttccccaagctcaagctgtgtcgaaaacagcatggccagcccctcggcaagttcctcctctacctgactcaggcctgccgggcttttaaagtacatttttaaggtgccgattgtattgccgttcgatgtcagcggtaggacaattgcagcgtgcaaagggcattcagcatgcgtgcattcaatctcttcctgcgaaatcgccttcataatatgccctgttttaatcacctttttggacaggccggtgatcaagcttttcgatgggatgtggtgatccattcccgcaccgacatgcgcaaggatcttttctttgtcagtgagagacaccgcatctgttcctgtcagcttatggataatagccgctacacttttacaggagttttcatttaatccttggcggaaaaatggaagtgtctgatcagcaatcgtaagcactcgatgcgtttcgagagcccttgcctgttcttccttgcgaatgatcgcttgaataatagacagaaaaataaaactgcctgttccattgatgagtatcatcggaattccgatcatgctgacaagctcccaagcgtcactgaacggctttgccatcagcaaaataatgatcatttgcagtgactccatgccgattcccacaagagcggcgatgcgcggtgtcggcattcgatatcgcttcgtaaaatacctgccgatcaagcctgcaagaacacccgctaaaatagatgagacggcacagcttaaggccgtgctgccaccgagtgaaaaacgatgcaggcccgcaagtatgccgatcccagcccctacaaaaggacctccgagaaggcccccgatttccacgcccaaaatacgggtattcgcgatagagcccgatggatctatcgtaaacacccagtcattgtttacaatcatatttctttgaatttcgatgcctgtataattgctgatgatgctgaaaagagaaaaaatagaaattaaaatcgcttttcctttatagccgtcctgattctgaagagcttgtctgaaaagtttcgtatgggcgagaatgaaccctaatataacaataatccccactctctccagcatcataatcattaaatgaatcattcatgtcacctgttctttccgttttcattctagcatgttttcgttttgcggctgactgtttttttaaaatcgtctgaaaacatatttcacaaggcttttatctattgtaaaataaaacatgagccttttggcagaaagatttgaatctgaagcagaggagaagatcatgaaagccgtattttttgatttagatgatacactactttgggacgaaaaaagcgtcagaacaacatttgcagaaacttgcttacaggcggagaaaaaatatggccttgcccctgaggaattcgaagcagctgttcgcgaagcggcgagagaattgtacatgtcatatgagacgtatccatatacagtgatgatcggcattaacccgtttgaaggactgtggtccaatttctcagagccaatcagtgaaggctttcaaaagctgaacaagattgtgccggagtacagaagaaatgcatggaccaacggactgaaagcgcttgggatcgatgatcctgcatatggcgaatacttgggagagttttttgcggcagagcgcagaaagcgcccgtttgtatatgatgaaacttttgctgtactcgatcaattaaaaggcaagtatgaattattgcttttgacaaatggcgatcctagtctgcaaaaggagaagcttgccggcgtgcctgagctcgctccttacttcaatgaaatcgtcatctcgggcgcattcggcaagggcaagccggatgtttcaatttttgaacactgccttaagctgatgaatattgaaaaagacgatgccatcatggtcggcgataatttgaatactgatattttaggcgcttcaagagccggaatcaaaaccgtttggatcaaccggactgataagaaaaacgaaactgacgtaaagcctgattacatcatcagcagccttcatgatttgtttcctatattagagaaataaaaaaagcatgatctcttcaatgagatcatgcttttttattttattttttcgcttcagctactgcctttttcacaaactcatcaagtgaaatggtttcagagttctgttctccgtatttacgcacgtttaccgctccgttttctgcttcttggtcaccgaccaccagcatgtacgggattttttgcatttgcgcttcacggattttgtagccgattttttcatcgcggctgtcgacttcaacacgcaggccttcacattgcaggcgttcctgcacttttttcgcgtagtctaaatgcacagccggagaaaccgggatgacttggaactgaaccggtgcaagccatgtcggcagcgcgcctttgtgttcttcgattaagaaagcaacaaagcgttccattgttgaaacgacacctctgtgaatgacaaccggacggtgctgcttgccgtcctcaccgatgtatgtcaggtcgaaacgttccggcaataagaaatcaagctgaaccgtagacagtgtttcttcttttccgatcgcagttttcacctgaacatcaagtttaggtccgtagaatgccgcttcaccttctgcttcgtaatagtcgtggccgatttcatccattgcctctttcagcatggattgcgctttgttccacatttcatcgtcatcaaaatatttctctgtatcttccggatcgcggtaagacagacggaatgtgtaatcacttaaaccgaagtcttcataaacatcctggattaaacggactgtacggataaactcatccttaatttgatccgggcgcacaaagatgtgtgcatcatttaacgtcattccgcgtacccgttgaagtcctgacagcgcacctgacatttcatagcggtgcatcgttccaagctctgcaatacgaatcggaagctcgcggtaactgtgaatgtcttgtttgtaaatcatcatatggtgcggacagttcatcggacgcaatacaagtgtttcattgtccatttccatcggagggaacatgccttcctgataatgatcccagtgtcctgatgtttcatacagctctttgctgcctagcacaggtgtgtatacgtgctcatagccgaggctgatttctttatcgacaatgtagcgctcgatgacgcggcggattgttgcgccttttggcagccaaagcggcaggccttgtccgactttttgagagttcgcgaacagctttaattctttgccaagctttctgtggtcgcgttctttcgcttcttctagcatacgaagatgctcttcaagatcagcttttttgaagaaagctgtaccatatacgcgctgaagcatttggtttttgctgtcaccgcgccagtatgcgcctgcaaggcttaacagcttaaattctttgatttttccggttgaaggaacatggacgccgcggcacaggtcaaagaattcgccttgctcatagatcgaaacggtttctccttcaggaatcgcatccaatagttcaagcttcaggtcgtcgccgatttccgcaaaacgggctttcgcttcttcacggctgacttcttttcgaacgatcggaaggttcgcattaacgatttttttcatttctttctcgattttcggcagatcctccggtgtaatcgcttcgtccatttctacatcgtagtaaaaaccgttttcgataaccggaccgacgccgaatttaacatccttgtagatgcgtttaatcgcttgagccagcaagtgagccgcactgtggcgcataatttgaagaccttcttctgagccttctgtaatgatttccactgtaccgtcttcattgatcggcgttctcaaatcgatttcttttccgttcagttttccggctaatgactttttctttaatcccggactgatggatgccgcgatatcttctgttgttgttcctttcgcaaactccttgactgctccatcaggaaatgtgatttttaccatatctgacatctttgtcactcctttttttgcatataaaaaccccgccccctatgaaagggacgaggttgaataaacggaatcgtggttccacccttttttccgcaaagccaatacacggcacctgcggctctaagctctgtaacgggagttcccgtcagccattactgttccttttcaagaggttcacagctgaagttcaaaggcggtaaagcgaatggtccttagctgggaagcttgcagccagggcttccctctctttgagccggtatcattccttcgtgtccttatcaatacgtgtgtctttcttaatctcctatgtattataaattgttcaatccaaaaaatcaacacgatcgcgtttccttttttttaaaccgacagccttaaatagacaggctgccggccctcatccttccgagtgcttcaccggtatttctgcatctgtaaaagcatgcagcgggagcatttccactctctcttgaaatacgttttgaatggtccttgccatcatgtgctcgggctggtcggtataaagcacgacttcatcaggcgcaatggaaatcagcggcgcgagcaaatgagaatcaatatacataggatgatcccggacaaatcttctgtctatgtatttcattttttcccgttccggcacatagcgcagctcccataatgtaaaggaaccatcatggacaatatgcacttttttgattcgcggctgtttggcgtccacatagtctctgagtgtttgaataaagttttgatattcctgttccatcttatattcatcaatcgctgcttctgtaatatctctcagctgcttatagtatgatccaagtcggaaggtctgaaaggagcgaatgtaaaatactccttcctctaaacagatcgtttggagttcatccaaaattgattgtttccgtgaaagcttcagcggctcaaacggaagatcgtctgcttcaccttcaataatactgtgtgcgagctgaaggatttgctgctgttcatcctggtccgtgaaacaatacgtttcctcaatcaatgacagcatatgctcgtcttctttgcattccaaaaaaaatttgaccagaatcggctccataaaacgctgaataggaaaagccggattcgctttttcaatcccgatttttcgtatgccttcacggacaatgatattgttccgatcgtccgaatgctgaatgagatgtaaaaaagcggctgcatcatggtcatcttcaaagattatttcaagcatgtttgtccccccttacggcatctgttacaagtatatgggggatgtttttaaaatagacgtaaaggtcattggcaaatcttaatttgattcttggaacaagttttgcattttctttctgaagatgaacggcaatgagataaacacgatatacaaagcgagcaccataaagaaagcgggcagattgccagccaaaaagctcgcacccagcacattaagcgcaatcgtcccagggatgattcccacagccgttgcggcaaaatacggcagcgctttgacattggaaaggcctgccgcatagctgacgaaatcaaaattgatcggcaggattctcaaaagaaagatatagaaaaatccgttatcctccatttgcttctgtatggcttcaagcctttcgtaatgcccgttctttttcgccgaaaacaaaccagccgcaaaaaacgaaacagctgaagcgcacatcgaaccgaataacgtataaagcgtgccgagaagcgggccaaacgcaagtccgccagctattgaaataacagacaccggaaataaaacaagtggcctgacgatggatatcccgataaacatcagaggtgcaaagactccgaacgacaatacccataccctgatttctttcggcgatacattcaaatacgttttatttccccaatagagtaaaccagcacctgcaagcactgccagccatttgacagccgtttttcgtttcataccctcagttccttcccctttgaaccacagcaattatggatgtcggcggttttctccgtcaaggcggatcggagcagccaaatataatatccgctccattaatcttgcagcttttacttcttctttttctcccctctgcgaatacgtaaaatgatgcttcagctcgtcaggtgagaaattagaagaaaagaacgttggcagctgctgggacattctgtgctgaagcaccgttccgatgacctcatcccttacccagcttgtcattgattctgctccgatgtcatcaagcattaatacgggtgtggtctttaccatattgagcttctcttccaatgtctggtcttgcagcgaattcttaagctctctcacaaattcaggcacataaacaatcatggaggaatactctttttccgccagctcattggcaattgcagcgagcataaacgtttttcctaccccaaatttcccgtataaatataatcctttcccttttcccgtctcattatagcttttcaggaagtctgtaacatgctgaaacatcgcgagtctgcttgggtcactgatatcaacttgctggaacgtcgctccaagaagatcctgctggatatacatgcttttcataagagactgttgtttcttctgctggtcgagcttccgtttgactggacattcgtaatactcgatatcaatagacctcccattgacaacaagcttcggatggtagccctccaacaaattgttgcagttttcatcttccgaacaataggagcaattcttgctttgttcgatatattcataaagcttatttaagctcttttcgatcattttttggtcaatcacttcttcgttttccttcaaaaatgcttgaacatcttgatctttcatgactttttccttcatttgttcaagacgtttttggaaatccggcctgccggttacgccctgcagggaacggccgattggttccatctattccttcaccccgcatctctgtctttaataggcagagtattttttcagtttttgcatttcttccatcatctttttcttctgttcttccaaatcctgcggatgcagcttctgctgtccggattctgaatcggacgctgtttccttttctgtcatccaatcaggaagcttttcttcacgaatcactttttggtttcgtttcgaagactttgtttttccctcagcccattcaagatactggcggttttcttctattgcgagcttcatcgcttccctgaccgttttcacctttttgcgtgcccaatgcgaagcgattttttggatatagtttttcgacagcttcatgtcggttttcagcatgacataataaattaacacatttgtgacgcctggctcgagcttctgttcgaacataatttcttctatgatcttcagatcagcttttgacggctctgttccgtcagcaatgtcctgcagaagcttcttcggggaaatcgcctccagcaatgcaatcagcttcccatccagagaatcctcttctgccggttgttcgccttcacgcagatgcaccggctgtgttttttccaccaaatcgggcagctgtccgtttctttcaatttgataccagtcgctcgccgcttttcttaatgcctccgtcgtaatgacgtcacgctcatcaattgcgctcatcacaacattttgcatttgcaaagggtcaattccgtacagataagaaagctttttgattgtgtcccgcacctgctgggtcatcgcttttctcggtatcatcgtctcagaaagtcccgctaaaaacaaatcaaaatcaaacacatcctccgttatggtgtaggacggagactgtccgacagaagtatactcggacccctcggcaagccttaccgtttcctccatatcggatgtgagcttccattcactcggctgcagcgattcaaacgcatgattaaacggacgcgtaatgtccttcgcatcttctgaaatggccgggtgcgtaaaaaattgttttaattgctgatatttcgtttttccgaccctattatacagaaaaacattcagcattccgtcttcaaaaaattcatttggtctgagcggcggaaggagttcatatataaagaggcgctcctgccgctcggattctttcatatatactttcagcaatccgatgccctcgagcttcccctgttcctgatggatcgtttttaagttggactgtgtcatccccatcagctgtctatgtgtggactctccgccccacagacggttttgttcaagctctccccacaatgtcatataaagagagaatgcaacagggccgattaagggctggtacagttgtgtaataatttgtctgtcaatatcctgcagcatcgatctgcttttaaccacatacgggtctacaggcagtacatctttccaatagtcagccatacattctcaaaccttccgaatttgtttctacctttcattttacaccgtttcttatatctatcaaatgccaattttgcacatgagaaaagagctagaagaatcctcttagctcttttaacgctctttctttattaagtcttttaattcatcgataaagacgtttatatctttaaactgccgatagacggacgcgaaccgcacatatgcgacttcgtcaatcttagccagccggtccatgaccatttctccgacgagctcactcttcacctcggagcagccttgattgcgaagttctttttcaatatcaaagcacatgtcttcaagcgttttgagtgaaacaggccttttttcacatgcttttatgaggccgcgcagcattttttctctgctgaattcctcacgcacaccttcttttttcacaacgatgagcggggtttcctccactttctcaaaggtcgtaaaccggtagtggcaggattcgcactcgcgtcttcggcgaatcgactttccgtcatccacaggccgtgaatcaaggactcgtgttccgttatgctggcatgaaggacatttcaataaaatcagctcccaactatatcgttccctgcaatgtattttcggcagcctccgccttttaaaaatagatgtgacagcatctgtcgggagagccgttgttaaatttgtttctatagcattaggtggtttgtgaaaatctccttcttattttacaaaaaaaatgaaaaaagaaaaagctgacactctcgtttctttataaaaataaaaggagcataagctaaaaagcgcataatggctttctagcttcagctccctttgtgttcgcaatttactttatagtactttcgcttgcgcctgtttaatttgcacaggccccattcctcttggtatttcaatgttttctcttgtatcagcatgtaatgcctctgcaatgtaatcagcagcgacattaggatctaagtctccacaagtataaacatcaatgctcgcatatccgtgctcaggaaaactgtgaatcgttaagtgtgattcagaaataatcacaactccgcttacgccttgcggtgcaaatttgtgaaatgcaacctcgcgcacctcagcacctgattttagagcagcatttacaaacgttttttcaataaaatccatgtcattcagcttatcaaaatcgcatccccatagctcggagataacgtgacgccccattgtttccatagtcatggaccccccttaacaagaattaaaaagtgaaattccaacaactgggtcggccatttaccacgggggaaagttagtccggagaggtcctaaccctttaagtaattccgaaacagtctcaagcaagaagttcacgaaaaatagtatactgtgtttaagtctaatttgcaaggtgcgttttttcagaaatatgctgttaagggttttttctttaaaatgtgtccatgaccttattttatacagcagacggatgtttcattcgtgccgctacatggcggattagatcaacaactctgcaggagtagccccattcgttgtcataccacgccagcacctttactttcctgtcttccattaccattgttgtaagcccgtcaatgaccgctgaatgcggattcgtattataatcagtcgaaacgagcggttcatctgagtaatcaagtacaccgtacatcgacgttttggcagcgcgtttaaatgcctcgtttacttcttcagccgtaacatccgttttcagatcaacaacgagatcaaccaatgagacgttcggaacagggacacgcaaggcgaggccgtgaagttttcctttcagatgcggcagcacaagcgaaagcgcctttgccgctcctgttgttgttggaatgatggattcaccgcaagcccgcgcccggcgcaaatctttgtgcgggttatcaatatttttttggtcattcgtatacgcatgaactgtagtcatcagaccgctctcaatgccaaactcttcatccagcacttttacaacaggcgcaaggcaatttgtcgtgcatgacgcatttgaaataatgacatggcgctcagcgtcgaattggtcctcatttacgcccatcacaatggtaacgtcttcattttttcccggagcggtcaaaatcactttttttgcacctgcttctatatggcccatcgctttatctttagcattaaacttccctgttgcttcgacgactatgtcaatatcatattcccgccaaggcagctgttttggatcacggctgtttaacaaaagcactttctttccatttacgatcaggctatcttcaccagccacaacctctttgtcgtatctgccgtgaattgtgtcatactttattaaatgagccagcgtttctgcggaatagctggcgttaatggccactacttgaatttgatcgtctaacatcgcttttctaaaaaccattcttccgattcttccaaacccgttgatcgctacttttaccttcatgttggacaccccttatcaattatgccatcctaatttgttactatctaaaattagtataacacattaaaacaaattcgccagtacatattgataaaaatcaacgattataacgctaatttatgatgcatcttatgttttcttgcacagaatatcaggcgtaagaaccaaaaagcagccagcgctccgcactgactgccctcatgctttatgattcctgttttaacttatcattgagcacactttcttctagcacagaaaatgtatccccgtacactctgttaatatgattcgctccccaagcacacagcatatctaaaatcccttctaagctgcggccgtattcgctgagctcgtattccactttgggaggaacttgattatatacgattcggttaatgacaccgtccgcttccagctcgcgcagctgctgagtcagcattttttgcgtgatattgggcattaggcgttttaattcacttgtgcgtttttttccgtgcgtcagatggcataaaatgacgcatttccatttcccaccgatcacttcaagagtcgcttcaacagaaatgttatattttttcttctccatacaatccattctcctcacaggcaccaaaaagtgactatagcacttcaaagtacgtacttttatttcttaacgatatgtttcataatcacatttgccggctgatttgaatctgctcttttttatttatatagcttactcggcagaatttcaatcatacaacacatcttacaaaggaggaacatcatgacttcagccaataaaagcaatattcctgcactactggctttggccgtaagtgcattcgcaatagggacaactgaatttatcagtgtcggccttttgccgctcattgctgatgacctggatattcccgtcacgacagcaggattgaccgtttccctttatgcgctcggcgttacatttggggcacctatattaacttcattgacctcaagcatgtcacgtaagacactattgctttggatcatgtttatttttattgccggtaatacgatggcagcaaccgcttcaagcatcgggattttactagcagcacgtgtgatatcggcattttcgcacggtgtgtttatgtcgatcggttcgacaatcgcagcggatattgtcccggaggataaaagggctagcgcgatttcaattatgtttactggcctcactgtggcaactgtaaccggagttccttttgggacatttatcggccagcagttcggctggcgtttcgcctttatggtcattatcgccgtcggaatcattgctttcattacaaatggcattcttgtaccgtccaaattacgaaaagggacgaaaacaacgatgcgggatcaattgaagcttgtgacaaacagccggttattgcttttatttgtcattacagcgcttggatacggaggaacattcgttgtgttcacgtatctgtctcccctgcttcaggaagtaacaggcttcaaagccgggactgttgcagtgattctgctcggatacggaatagctattgctatcggcaatatgattggcggaaagctgtcaaaccgaaatccgattgccgctttattctatatgtttatcgtacaggcaatcgttctattcgtactgacatttacagccccgtatcaagcagcagggctcattaccattctctgtatgggattgctggcctttatgaacgtgcccggccttcaggtgtatgtcgtcatgctggctgagcgttttgtcccgagtgcagttgacgtcgcatccgcgatgaatatcgctgcctttaatgcagggatcgcgcttgggtcataccttggcggtgtgatcaccgattcaatcggattgattcataccgcttggataggcggattaatggtggtcggtgcagtcattttaacaggctggagccgcttgatggaaaaacgagatcggcaggaagcctgacaattttaaaggaggaaataaacatgacaacacatttacaagcaaaagcaacacttcataatggggtagaaatgccttggttcggcctcggcgtgttccaagtggaagaaggatctgaactggtaaacgcagttaaaactgccattgttcacgggtaccgcagtattgatactgcagcaatctatggaaatgaagctggagtcggagaagggattcgggaaggcattgaagaagcaggcatttcaagagaggatctgtttatcacatcgaaagtatggaatgcggatttaggctacgaagaaacactcgccgcgtttgaaacaagtctgtccaaactcggtctggattatttggatctatacctcatccactggcctgtagaaggaaagtataaagaagcttggagagcgcttgaaacgctgtataaagaaggccgtatcaaagcgattggcgtaagcaacttccaaattcaccatcttgaagatctgatgacggcagctgaaattaagcctatgattaaccaagtggaatttcacccgcgcctcacacaaaaagagttgataagatactgccaaaatcagggcatccagatggaggcttggtcacctttaatgcagggacagctgctggatcaccctgtattggctgacatcgctcaaacatataataaatctgtcgcacaaattattttgcgctgggatctgcagcatggcattataacgattcctaaatcaacgaaggaacaccgcattaaagaaaatgcaagcgtatttgactttgaattaacgcaggatgacatgaaccgaatcgatgcactgaatgaaaacttgcgcgtcggtcctgatccggacaactttgatttttaatggccaaaaaacaccgttcaatatgaacggtgttttttgtattatgcccagctgttcatgatttcatcaagctgccttttggtctcttcaagcgtgccgctgttatcaatgacttgatctgctcttgctgttttttcctctaagggcatttgagagcggatacggctgactgcttcttcttctgtcagctgattgcgcttcatcagacgttccagttgaagctcttttgtcacactgaccacaataattttatcaaccaatgattccaatttgctttcgaacaatagcgggatatccaatacaacaaatgcctcccgatttgcaacggcttcatcacggcgattgagcatttcctgcctgactgcgggatgaacaattgcatttaaagcgagacgtttttgttcatttgtaaataccagcgctccaagcttttttctatctatatcgccatttgagagcagtatgtcttcaccgaattcgtcaatgatttgccggtaggccggcatccctttttctaccgcttgttttgcaatgatatctgcatctataactgttattcctttttcaatcagcatattggctaccgtgcttttgccgctagctattcctcccgttaaaccaatgactaaggtcaagagatccactcctttttacaatttccagagcccaatcgtgattaatagaagccccggcaaaaacgccattttatcgatccatttccacttagacagaaaatggccggcattgattccaattgatacaaacagcgagctcatgattgccacggcgatgctcatcacaatcggcgaaaaaccgagaatggctgcgcctatacctgctccaaaggcatcaatcgataaggcaaatcccaataagaccgcctcaattccgttgatcacacccgatttgtcgatatccgcactcatgggttttctcaaaatatgaatcacaattcctaatgaccgaacctctagattaagcagtgttttttcatgcaataggtattctttatcttttgccggtttgaaaaattgatacagaacccacgcaccgattccaaccaatatcaaaccgccaagcttctccgtcacatatacaggaaaaaacttcgtgagaaagcttccgatcagcatggatataaacatgacagcaccggaacagcaggcgataaccaaaatcgctttaaacggtattttcatttttctcaatccgtacgtaaatccgactgaaaaactgtccaagctgacagccaacgccagcagcagtatagaaaccatttgcatatccgtttcttcctttctgttggtgctcttgtatcagatgtgaaatgcccgggattcatcacaatcatatatatgggaaagtgaaaaatccgtgtttcgaaaatggcatccttaatccagagttactgatatatgcaccgacagcttggacaatgaagcattatgctacttttttgtctggcactttgcgcaaaaatgcgtgcctcttcctccaacgacaattttcgaaatcatcgttccgcaatttttgcatggctcgtctttttttccgtacacaaaatgctgcagctggaacattccgatttccccttgggagttgatatatgaacggactgtgcttccgcccgcatcaatcgcctcctgcagagtgtttttgatttcagcgtgaagggttttgattgttttatctgataattgatttgcttttgtctcgggatggacacccgctctgaaaagagcctcatccacataaatgttcccgagtccaactaccgttttttgatccagtagggcagttttgacagcgcggtttgttttcgcaagccggtcttttaaatacgcacttgtaaattcttctgcatccggctccggccctaactgagaaagcgggagctcgcccgcttcttctcccggtttaaataagtgcatggttccaaatttccgcacatccctgtaccggagctgggttccatccgtcatcgtgaatatgacatgcacgtgtttatcgtcaggctcctcggcttgatgaagaccgtattttccttccattcgaaggtgagaaaccataacataatgatctaaatgaaacagtaaaaactttccccgtcttccgatggactgtatcgtttctcctgctagttttcgcgcaaattcctccggttcggcaggccgtttgatgatattcggccatctgatctctaccgatttgattgtttttccctttacaagcccggtcagagtgcgccggaccgtctcaacctctggtaattccggcacatccatcacttcctatctctgtttatttcgcatcgtaccaagatgggcctgatgcaaagtccacctttaacggcacatctaatgcaagcgcatgctccatcacttcaggaacaagcttttcaagaatttcaatttcttcctttggcgcctcaaaaatcaattcatcgtgtacttgaagcagaagccttgctttcaactgtttttctttcagcttggcagccatgtcaatcatggcttttttgataatatcagcggcgcttccttgaatcggcgtattcatggccgtccgctccgcaaaacttcggatattaaagttccggctcgtcagctcagggatgtagcggcggcgatgcataagcgttgttacgtatcctttttgtttcgcttcctgtactgaatcttccatgtacgcttttacgccttggaagctttccagatagcggtcgataaatgctcccgcttccttccgggtaatgccgaggttctgtgacagaccgtaatcgctgatcccgtaaacaatgccaaagttgaccgctttcgcctggcgtctcatcgcagatgtcacttcatccttagcgacatggaacacatccattgccgttttcgtgtgaatatccatatcattagtaaaagcttcgatcagattttcatcctttgaaatatgggcaagcacccgcagctcgatttgtgaataatcggctgcaaaaatgagccagtctttttcagacggcacaaaagcttggcgaattttccgcccttcctcaagcctgatcggaatgttttgcaggttcggatcagtcgagctgagacggccagtttgcgttaaggcctggttaaatcgcgtgtgcactttatgcgaatccggtctcgtcacctttaaaagcccttcgatatatgttgattgaagcttgccaatttgtctgtactgtaaaatatagtcgacaatatcatgcttgtcagccagcttttcaagcacatcggcagacgtagaatagcctgttttcgttttctttacgacaggaaggccgatcttttcaaataagatgacgcctagctgtttcggagaattgatgttaaacggctctcccgcaatctcatggattttttcttcatattccttcagcttcgcacccagttcttcacccatccgttttaaacggtcaacatcgaccttgacgccagttgattccatttcgccaagaataagcgcaagaggcatttccagctcttcaaacagttcaagctggtcgttgttttccagctcttgaacgagcttttcccgaaggctttgaatcgctaacgcttttcggccaaggtgctcagacagtacgtcttctgacggcactgcccgttttgctccttttccataaactgattcatcacttgaaacgatatgcaggccgtaatccttagccacactcgcaacgtcgtcatatgaattgcccgggttgatgatataagccgcaaggagcgtatcaaactcggctcctttcagctcaatgccctgccagcgcaaagcgacaacggcccgcttgctgtcgaagacccatttcttctgctcgtcattttccacccattctttaaacacctcagactcaacggcaatgtctttcggaatgaaataagctcccgtttcatttacgatcgaaaatccgaggatcggctcttcatgataattatcgccaatctgttcaacgacaaatgcggatggagaaaccaatatatcgcttgtcacgtctgtgactgttttgacattaatgtcttccaacgattgatcctgttctgcttctgcactgtcttctccaagccgttcaagaagcgtgttgaagccaagatctttaaagatggcaatgacctgttcacgattaaagccttgatattccaggccggaaacagatacctcaatcggagcatccgtcataattgtcgcaagctccttgctcatcaatgcctgatccttaaactcctcaagcttttccttcaatttctttccgctcacctcgtcaatggactccagcagcttttcaacggaatcaaattgttttaaaagcttaatcgcagtcttttctccgacgccgggcacacccggaatattatctgaggaatcgcccatcagacccttcatgtcaatgatttgttcaggcgtaagcccatatttctctttgacatgctccggtgtgtaaaattcaacatcggtaattccctttctcgtaatggcaactgtcgttttgtccgttgccagctgggttaaatccttatctcctgagaaaaccttaacttcaaatccgtctttttcagccgatttggccagtgtgccgataatatcatccgcttcatattgttccagttcatagcggctgatctggtaggcatccagcagctcgcggataaacggcatttgttcggaaagctcaggcggggttttctgtctgccgcctttatattctttaaatgtgccgtgacgaaatgttgttttcccggcatcaaacgcaaccagcatgtgcgtcggtttttcatcctcaagcattttcatcaaaatcatcgcaaagccgtatacagcattcgtatgaacacctttatcattgcttaacagcggcaatgcaaaaaacgcccggtaagccagactgtttccgtctacaagcactaatttttttcgttccgtcattcaatttcctcctaagaagcctcaggcttccattcatctcttacatagtcattagctcctcttattttaacaaagttcaatttgaaaggaaaatacgtgaactataagagaagacacaaaaaaggacgggaacacaaataggttcccgccgtcaaaattggctccttggatgaaggggttctactacatcctaccagcataggtttaacagtgcatgaagatattgttaaacctttgtaaacattaggcggacttttcagcggcccgtttcagcgtcacggtaaagacagttccccgtccaagctcgcttgtgacatcaattttcccttcatgagcctctattaaatgcttgacaatcgctaggcccagcccggttccgcccgaatttctgcttctgtctttatctacacggtaaaagcgttcaaagatgcgcggaatttcttctttctgaattccgattccagaatcggcaacctcaatctgaatgtctttttctctgggctttacattgatagccacggagcccccctcaggcgtgtaggttaatgcattgtttacgagattaagaaatacctgtttcagcctgtacgggtcaccagatacatattgagggtctttcgggacattcaggtgcaaggagatgcctttctcatccgccttatgcttcagaagcgtttcaatctcaccaagcattttggccggctcaaacgtttcgatactgagcgtgaaattttgctgctcgatttttgagagatcgagcaaatcctgaaccaaagactgaagcctttcgctttccttaagaataatagagagaaattcagaaagcgcctctttgtcttccatcgccccgtccaataacgtctccgtaaacccttttatggacgtaatcggtgttttcagctcatgagaaacattggccacaaaatccttcctcatctgctctaatttcttcgtttccgtcatgtcatggaaaacgagcacaattcctttccattcatcgtccggccccataatcggaacgccgtccacttcaaaataacgccgttctattttgatcggcagtcttaacagcttgcatttctttgtctccgtcataaaaatgtcttcgacaagctggatcacttcttcatgttcaaatgcatcgtgataaagacggcgcagcatatgattcggattgatatgaaactgcttggcgtaagacctgtttacgagattaataaagcctcttccgtcgatcataatcagcccggagccaatgttttcaatgactgtcagcagccgatcccgctgcatttcctgcgttcgcgtcatttccatcagatcaatggcaaggctgttcatcgcatgtcctagcttatcagaacgcctaatatagccgccgtacgtccgtgcatcgtagttgcccttagagagttctgtggctacatttgtcgctgactcaattgaccttttataacgtgaggtcatgctggaataaaaataaacaatgacgataaatgcggtacaaagactggccgtcagcatcccccacaattcgccttttaagccgtcgcttttttcagaggcggaaagcagcacatatcctgttttttcaccttcgcttctaagtgaaagtccgtaataaagcttgttatctgttgttgacagaataccctcatggccagaaacaagcgcctgcaccttttgggaatcagccgatctaccgtttgacccatacagcaccttaccgtctgtatcgataacggatgcgctcacatcaagcgcgccgcctgcatctttaatgattttctcatttgcttgattattcagattgccggcatcaagaagcgaagccaagtattttgcttctttttcaatgtgttcctctgctttcctttgatcagatgtttcaaaaagctgctgtaaaaacagcccgaggacacaaaacaccagaatcatacagacaacgaatacagaaaaaaggcgcacacggtatttattcattcatttttggctcctccagtttataccccaatcccctaatcgttttaatgtagatcggttttttggtattgttttcaattttgtcgcgaagatggctgatgtgcacatcaacaattctcgtatctccggcaaaatcataattccagactgcgctcagcagcaggtctcttgtcagaactctgcctttatgtctgcctaaatagagcagcagttcgaattctttcggtgtcagttcaagctgactttctttaaagtacgcttcataatgatcaggcaggattttcagatcgccgattacgatctggccttccatttcatcgttcttcatctcactagagggcgcagctatttccgaacgccttaaaatcgctttgactctcgcatttacttcccttggactgaacggcttggtcatataatcatcagcaccgagctccagccctaatactttgtcgaattcctcatccttcgctgtcagcattaaaatgggaaacatcagtttttgctgtctcagctgcttgcatacttcgattccgtccaattttggaagcatcacatcaagcacaatcaaatcaggtttctctgtttccgcttttttgagtgcttcttccccatccgaggcggtaatgacatcatagcctgaccgttccaaattgtactgtaaaagagtaacaatagattcttcatcatccacaactaaaattttcttgttcatgctgtgcctccagtattataattccccgacatcctatttctctattttatgtcatcttaacatgtttcatgattttattttagcgaaagcaggacattccgacaattcgccttttacatcatttttaaaagaaataaagacgtttatgatagcgctttcatttatagtaaaaagagaaaggctgtattaagcaagcctttctctctttttattaggataatactttcatgacatttttgacagattcaactgatttattcagctgcgctctttcatagtctgtcagttcaagttcaatgatttgctcaagaccgttgccgcctacaattgtaggaacaccaaggtagatgccttcatagccgtattccccttcaagataagcaattgtaggaaggacgcggcgctgatctttcaagatcgcttcgaccatttctgtcagagaagccgcaggcgcataatacgcgcttccgtttccaagaagattcacgatttcgcctccgccttttctagtgcgctccacaattgcgtcaatccgttctttcggaataagagtttcaagcgggataccgccagcataagaataacgcacaagcggaaccatatcgtcaccgtgtccgccgagtacgaaaccagtcacatctttcactgacaggtttaattcctctgccacaaatgttctgaatcttgccgtatcaagcacacctgactggccgattacacgctctttagggaagcctgattctttgtacaccgcgtatgtcattgcatcaacaggatttgtcagcaccacaataatagagtcaggagaatatttcacgatttcctgcgtaacgcttctcataatcttttcgtttgtagagaccagatcatctctgctcataccaggttttcttgcgataccggctgtaatgacaacaatgtcagagccggctgtatcctcgtaattggatgttcccgtaatttttgcgtcaaagccttgaaccgggcttgcttcaagcatatcaagcgcttttccctttgtcgggttctccaattgcggaatgtcaacaagaacaacgtctgccagctctttttgagcgattaaaaatgcagttgtagctccggtaaaacctgctccgataacagaaacttttttacgagtatttcccatgtctctcttctcctttatggctagttttaggctttttccttgcttagtccatgtttttgatcagttcttctccgaactctgaacatttcacttcagtcgccccgtccattaatctggcaaaatcgtaagttacgactttagaagcgattgttttttccatagatttgataaccaaatcagccgcttcgttccatcctaaatgctcaagaagcagaacgcctgaaagaataactgaagatgggtttactttatcaaggcctgcatatttaggagccgttccgtgcgtcgcctcgaaaatcgcatgtcctgtttcgtagttgatgttcgctccaggagcaatgccgattccgccgacttgcgcagcaagagcatcagaaatgtaatctccgttcaagttcattgtcgcaacgacatcaaactcgtttggacgcgttaagatctgctgaaggaaaatgtcagcaatgctgtctttgataatgatttttcctgctgcttccgcttcgctttgcgctttgttggcagcgtcttttccttgttcttcagcaatgcggtcatattgagcccatgtgaagactttatctccgtattctttttcagcaagttcatagccccagtttttgaaggcgccttctgtgaacttcatgatgtttcctttgtgaacaagtgttacagatttgcggccatgctcgatcgcataatcaatggcagctctgaccaagcggcttgttccttcttctgaaacaggcttaatgccgatacctgatgtctcagggaaacggattttattgacgtttaactcattttgaaggaagctgataagcttttgcacttcttcagagccttttgcatactcgatgcctgcgtaaatatcttctgtattttcacggaagatgaccatatcagtatcttcagggcgttttaccggtgacggcactccagtaaagtatcttacaggtcttaagcagacgaataggtcaagctcttgtctgagcgctacgttcaaagaacggataccgccgccgacaggtgtcgttaacgggcctttaatcgcgatgaaatattcgcggatcacatctaatgtttcagcagggagccactcacctgttttattataagccttttctccggcgtaaacttctttccatgtaattttcttttcgcctttgtatgctttttctactgctgcttccaaaaccttcgaagccgcgttccaaatatcaggaccggttccgtctccttcgataaatgggataatcgggttgtttggtacgtttaatactccgttagagactgtaattttttcaccttgtgccacaataaaaacctcccagtatgtaattcatatttagaaaacattttatttttcttatatagaaaataaaatgatttttcctaacattcaatttaaagtgtaacccaattttgatgttctgaacaagaggctaacctcattgacgcaagccagcctccaatggttctttaggctctttcttcaatcggaacgaatttttgtttgtcagggcctgtgtaatctgcccgcgggcggatcagacggttgttgtcatactgctcaagaatatgagcgagccagccggacattctgcttacagcaaaaatcggtgtaaacaaatcatggtcaataccgaggctgtgatatacagaagccgaatagaaatcaacgttaggcggaagctttttctctgatgtgacgatgtcttctatacgaatcgacatctcataccatttgctttcgcctgtcaggttggtcaggcgcttgctcatttctttcagatgcttcgcgcgcggatcaccatgcttatacacacggtggccgaatcccatgattttttctttcttttcaagtttagcgcggatgtacggctcagcgttttccacttcaccgatttctgtcagcattttcataacgccttcattcgctccgccgtgaagaggccctttcagcgcgccgattgctgcagtaatgcctgaatagatgtcagaaagtgttgcgacgcagaccctcgctgtgaacgttgacgcgttcagctcatggtcagcatgtaaaatcaatgctttgttgaaggcttcaacttcaattggtgaaggctcttcaccgtttaatgtgtaaagaaaattctccgcaataccgtaatcttctctcggttcaacaggctcaagacccttgcgaattctggaaaacgctgcaaccaggccaggcacctttgcctgaaggcggatcgcctttctgtagttggcttccgggttcatggtatcagcctcgctgtcaagcaggcctagtaatgaaattgctgtccgaagagcagccatgggatgaacattttcgagggaataagatttgaagtgctcaataatttcttgcggaacggcagcttcctttgcaagctgctgctttaactcttcaagctcttttttgtttggcagccttagatgccaaagcaagtagatgatttcttcaaaacttgcattctctgtcaaatcatcgatatcataccccacatatgtaagggtatcatcaataatagaactaacagatgatgttgttgctacaaccccttcaagaccgcgtgtcgctgtcatatataacatctccttttcaataaatttcccctttaagagtgttgtaaaaacatgaggcttacttaaaaagcacgatgcaagtatttctctcccccaaaaagaaaatgcttacattttactggctgctggaactaaaaccctttgcttatgaaagaacataacaaattcttataagcttatttaagtttaagcctattctcattataaacaataatcagacatttgttaaatgtttacctataattttttttttccattctgtgatttccccgaaaaaacgcctttatttgcgggtttttgcataaaaaaaagcggctttaaggccgcttttttttatgaagtgaacagttttacgatctgcatggctaaataagcaatccccgctccgatcagcggccccaccgcaactcctccaaaaagcgcgactgcaagaatggtcccgatcacgagagcagttgtaatatgcggatcattttcaagcagggtcaggccgttttttgcaatcagcgccactgcgatccccgctccaagggcgatccatgcgtaggaagaccgcattgcttctccaagctgcttaaatccgatttctcccgtggcaatcgggacaagaacggcgatggtaataatggtcacaccccagttaatgccttttgactggatggtcggaaataatttctgatcaagcccaacgattttgatgatcaaaaggacggatacagcaaagagcaatgattggttttttgcgataagtgcgatagccaagagtaaaattaaaaataaattcgcttgtgtaaacacatgccatccctcctttaagatgaatgtattcatattcagccgcagcgtgaatacatataaaaaataggacatgctgacgagaggaggaccgtttttgtgaatcaatcttatatcactatttttttcagaaccctctttgtcatatcaatgaccgcagggtcgatagctgcggcctattattcgtttccgttaacttatccgttcctgatcgcccttattctatcttcagtgattcatcctgttgtcgattatttggacaaagtgacaggattcccccgaacgataaatgttctgggcgttcttgctttttttctgctcgcagccttcggcgtgctcaccattctggtagccgaaatcgtaacgggaacagcctatctagcaaaaacgctgcctccgcatatcagcacgtttatttcatattgcgaaaaattgtttaccactcatattcagccgctctataacgagttaactcttttgtttcaagaattggaaacgaaccagcaggcttccatcgtcactcatatccagacactcggtgattctgccgctaaaaatgccgggctcctgctgtcccacattctagagatgatcccgagatttttcgctcttcttcccaatacggcggcggttctgattttttctcttctggcaaccttttttatgacaaaggattggcataagctgaaagccatgcttgttttaattctgccggatcgtgtgacagctaacagcaaagcaatcagcagcgaattaaaaaaagcaatgactggttttatcaaagcacaagccgtcctcgttttcatcacgatggtgattgtatttatcggcctttctctcttaaaggttgaacacgccgcaacaattgcttttttaatcgggcttgtagatcttctcccttacttaggtgccggctccgtatttgtgccctggattttgtatttatcgattacgggccagctgccccaagcaatcggaattggtatcctgtacctcgtcgttcttattcagcggcagctgacagagcccaagatactaagtaaatctatcgggatcgatccgctggcaacactcatcgccctgtttgccggctttaaattattcgggtttttaggactgattgcgggaccggctgtactcgtcatcatccaagctttcatcacaacaggcgcattaaaagaaatatggtcctatatcaccgttcagcaaaaataaaacggcagccgttttttcatggctgccgttttttatttgatgatgatccgcttattcttcgacattcctctcagccatttgaacagaatcggcttacaccagccgcgggtaaacgggataagaagacaggcgccggccaaatctgataaaaagcccggaagcatcagcaatagaccgccaatgaaaatgcacagaccgtcagcaatcgcttctcccggcattttgccatattgaagatcacgctgaaccttataatacacttcggttccttgtttttttgcagctgctgcgccgataatgccagtcagaatcatgaatagaactgtcggcaaaataccaatcagatttcctaaaaataggaatataccgatttctattgccggaaacacaataaaaagcaaaaacaaaaatctcatatccaagccccccacacgtgtaacacgttctgttcaacaaaaggcatgataaagagaaaaggaagggattccccttccattttcacctgtaattaaagaacgctcgcacggccttgatagactgcgcctctggaagcgtcaactgtaatatcctggccatctgtcaaaatagatgtcgcattttccagacccacgataaccgggatgccaaggcttaatccgactaccgcagcatggctagtcaaaccgccttcttctgtaataagagcagacgctttttcaagggatgcaatcatatcacggtcagtgcttttggtaacaagtaccgcaccgtcagtcattttttgctcagcttcttttgcattttgtgcaacgacaaccggaccgtaagctgatttgcgtccaatgccttggcctttagcgatgatatcgccgacagtatgaaccttcattaagttcgtagtgccggactcaccgacagtgccagctgtaataacgataagatcgccgtgttttacaattccgctgttcaatgatttttggacagcatcctcaagcatctcatctgttgagctcgcattttggccgctttccgcgaatacgccagatacgagggcaagctttctggaaatagagtcatttacagtaaccgcaacaatcggagcctgcggacggtattttgcaatcatacgtgctgtatggccgctttctgtcggcgttacgatcgcagcagcattcaggttaatcgccgtatgtgcgacagattgtccaattgcgtctgtaattgtcatgcccacttggtctctgcgttttgagagaatttctttataatttaatgcttcttcagaacgggacgcgatgttatgcattgtttgaactgcttcaaccgggtaacttccggcagcagtttcaccagaaagcatgatcgcatctgttccgtcgaagatcgcgtttgcaacgtcacttgcttccgcacgagtcggacgcgggttgcgctgcatgctgtcaagcatttgtgtcgctgtaataacaggtttgcccagcgcgttgcattttttgatcagttctttttgcacaagcggcacttcttcagctggaatttccacacctaagtctccgcgtgcaaccattaagccgtcagacacttcgagaatcgcatcgatgttgtcaacgccctcttggttttcgattttagggatgatttgaatatcctgagcgttgtgctcttcaagaagctcacggatttcgagcacatccgtagaacgtcgaatgaaagatggtgcgatgaagtctactccttgctcaataccgaaaacgatgtctcgcgcatccttttcagtaatccccggaagattgacacttacgcccggtacgttaacaccttttttatttttgagtgttccgttgtttaatacttttgttttgatttcgcgtttagcggcatctacatcaagtacctcaagaccgataaggccgtcatctaacagaatcgttgaaccttgttcaacgtcatggactaaaccttcatatgtcactgaaattttatctgttgttcctacaacctcgtccattgaaataatgagctctttgcctgtttcaagctcaataccgccgttttccattgtatgtgtgcggatttcaggaccttttgtatcaagcagaattccaacgttcttgccaagttttttacttgcttcgcggatatttttaattcttgcaccgtgctcctcaaaatctccgtgagaaaagtttaatcgagccacgttcattcctgactccattaatttcgtaagcatttcaatactttcacttgccggaccgatggtacaaacaattttagtttttctcatttggttcacttccttctgaaatcttcagccttcagctgtacattagatagacagttcttttgaaagctgatacatgttttgctcaactgtgtgttttgtctcaagtatttctataatatcatggtctacaagcttattgttttgtatacctacacagcgtccgccttttccttcaagcagcagttcaactgcatatgcgccgagacggcttgccaacacacggtcagcagcactcggagaacctccgcgctggatatggcccaatacagataccctagtttcaagatttgtttcttcttcaatgcgtttcccgaattcaacaccgctgcctacaccttcggcaacaataataatactgtgcttcttgccgcgttcgtggccgcgttttaagcgggcaatgatttcgtgcatgtcatagtctgcctcagggattaagatcgattctgcgccccctgcaagaccggcccacaatgcgatatcgccggcatgacggcccattacttcgattacatatgtacgttcatgagaagtcgctgtatcgcgaatcttatcaattgcgtcaattactgtatttaaagctgtatcgaaaccgattgtaaaatcagtgcccggaatgtcattatcaattgtacccggtacacctacacatggaaacccgtgttccgttaattttttcgcacccatataggaaccgtctccaccgataacaacaaggccttcaataccaagcttcttcaagtttgctatccctttttcacggccttcaactgttttgaattcaggacatctcgccgtataaagcttagtccctccacgatgtataatatcgcctactgatccgagttcaagcttttcaatctttccgctgatcaatcccgcgtatccgttgtaaataccgtaaacttcaacgtcatgatagatcgcttttctgactactgcgcgaactgctgcgttcattcccggggaatccccgccgctcgttaatacccctattcgtttcattctccattcacctcagcaacatatatgattaaacataacatgatcattgccctaaaaacaatgaaaagggatctccatcctccctatgaaaccttacctattatacaattaaataaattgtttttaaataaaatttaaggaatgtcacaaaaaataaacgtgagccaaaggcttcacgtttatttagtttaccccgatatattgatcttcaaccgagactttgccaattgctttatatttttcataacgctgctgaactaattcttcttcgctcagcttcagtaaagtttttaacgattgtttaagggtttcgtccatatagcttgcctgcagcttcacatcatggtgcgctccgccttttacttctttaatcatatgatctataatacctaattcttttaaatccggcgcagtgattttcattgtttctgctgcttttttagcaagactggagtccttccataaaagtgccgcggcaccttccggagaaataacagaataagtagagttttccagcatatgcaagtgattgcctacacccagaccaagggctccgccgcttccgccttcaccaatgacgatgcagataacaggcactcgaaggccggccatctcaaacaggtttttggcaatagcttcactttgtcctctttcttcagctgctcgtccagggtatgcccccttcgtatcaataaaacagataattggtctgttaaatttgtcagcctgtttcatcagacgaagcgcttttctgtagccttctggatgcggcatcccaaaattgcggactaggttttccttcgtgtctttgccgcgctgatgcccgattaccgttacagggaggccgtggaacttcgcaatcccgccgacaatggcttcatcgtccccgtacgctctgtctccgtgacattcaaaaaagtcggtaaacaggtgttcgatataatcaagagttgtcggacggtccgccagacgcgcgatttgaacccggtcccacggcttcaaatttttgtaaatatcatcctgaagcttagcgagacggtcttcgagccgttcgatttccgcacttagatccatatcggaatcttgggtgaatttttttagttcggcgattttggtttgcagttcaatcaccggtttttcaaattctaatcttggagccactcaatgtcacctcctgtttgatgcatatccagcagattttctaacgtttttttcatatcgtcgcgatgaataaccgcatcaagctgtccatgttttaataaaaactcagccgtttggaagtcctcaggcagtttttctcctattgtctgttcaataatccgtcttccggcaaaaccgatcagcgcgccaggctcagcgaaattgtaatcgccaagggatgcaaagcttgctgatacgcccccggtagtcggatgcgtcattactgaaataataagaccctgttcttcactgaacagttttaacgcagagcttgtctttgccatctgcatcaaacttaatacgccttcctgcattctagcaccgcctgaagccgtaaaaataataaacggaactttatcagcttttgctttttcaatcgcaagcgtgattttttcaccgacgactgaacccatgctgcccattctgaatgaagagtccatgacggcgacaacagccgggtgtccgccgatggtgcccttgcctgtcacaacagcctcgtttaaggatgttttctcgcgatctttttcaagcttttccagatatcccgggaaaccaagcggattttccgagagcattccctgattaaattcctcaaaggattgttcatccatcaagctttcgatacgctgttttgcgttcattgggaaatgataatcgcagttcatgcatacccgcatatttttatccaactctttagtgagcatgatttttttacacttaggacattttgtcataatgccttccggaacatcgtgcttcgcttgatcagacggtacggaagcatactttttctttttcgtgaatatatcctttaacaaatgattacctcccttttgtgaagggttctcttcaccgcatgtcatcaaacagatagacttgctaataactttaccgaaactattgtactttttttgtcaaacgctgtcatcctcaattcgacaactttttattcgatgacgtgctcggaaaggcttgtatgaaatcagataaggtgttgaaacgacaaggttgacagcgcattcaaaaataatgttaaacccggctgaaatttttttaaggctaaccccctaaaaaaatttcagccgtcagtttaacttgagaacagcgcgccggtctccgccaacgcgctgccatttttggaatgaattaaaattattcaccaataatcgtaagttttcttgttttttctgcgacttcctcagggtcaacagtgattcttgcaacacctgtttccatcgcagcttttgccacagccttcgcaacagcaggcgcaacacgtttatcaaacggtgcagggatgacatagtctgcgctaagctcatcttctgaaaccagtgaagcaatggcttcaaccgctgcgattttcatttcctcgttaatatgagtggcacgcacatcaagcgctccgcggaaaataccagggaatgcaagaacattgtttacttggttcgggaagtcagaacggccagttccgacaacgcttgctccggcttcacgcgcatcttccggcatgatttccggatttggatttgccattgcaaagataatcggatcttttgccatgctttgaaccatttcttttgttaacgcgcctgctacagagacaccgataaatacgtcagcatcaacgataacatctttcagagaaccgtctttgcgatcttggttcgtgaacttcgccacttcatttttgacatcgttcatgccgttcgggcgcccttcataaatggcccctttggaatcgcacatcacaatgtcgcgaacgccataatgatgaagaagcttgataatcgcaatgccagccgcacccgcgccgtttgcgacaactttaatggatgacatggattttccagacagtttcagcgcgttcacaagacctgctacggttacaatggcagtaccgtgctgatcatcatggaaaaccgggatgtttgtttcttttttgaggcgctcttcaatgataaagcagtttggcgctgcaatatcttcaaggttgacgccgccaaatgtcggttccagcaattttacagtttcaacgattttatcaacatcgtttgtgtttaaagcaatcgggaacgcatctacgcccgcaaagcttttgaaaagaactgctttcccttccataacaggaagcgccgcttcagggccgatgtttccaaggccaagcacagctgtaccgtcagttacaactgctaccatgttccccttcattgtataatcatatactttgttaatgtcttcatgaatatccttacacggttctgcaacacccggagaatacgcgaggcttaaatctttcgcatttctgacctctacttttgatttagactccagtttcccctggttgactttatgcaggtgtaatgcttcttctcttaatgacattctcctaaacactccttatggatattttttgattcgtatactgctgcgttgattgctgcattctgcggagtaaatctatctgaatatttaaacaggatcacataattgctccaattgtataacaaaaagcgaatcgttaccactgttttaaaacgacgtttttttgacccaacagctcttttaagcgatataacacctggtgatctgcattgatatggaacgactcaggtagcttaatcgtctgtttttgcctttcataatagagataaacgcctgtttcccctttatgctccagcaaaatgcgcttaatctttgccaggatctcctggctgtgctgactgctttctatttttatataaaccgatggcgctttttctgcatccatatcttctaataattctgcccgggacatgatgaattggatcttatcttgtctaacttcacatttccccgcagtgaacaaaagagcgccttctcttaaaacgggagaaagctgtctgaattgttcagggaagactacggcttccatctcgccggtttcatcactgagcgttaaaaacgccatgttttgacctgttttcgtccgaatcgttttgatcttcgacagcagaacgcctagtgaaagctgccttttgactgcccgctgagcctgcagaatggagactgctccttgcgcagtgagctgttttcggaaggcggagaggggatgatttgaaaaataaatgccaagcgtttccttttcaaacgcaagtaaatccaccagaggaagctcctccgtctccacatacttcggcttaattgaaaacgattcatctaaaaacaatcccatttggtcatcgtccgcggcgaatagctcagcatgttccaaagcaacatcaatggatgcgagcagcgtggcccggttttggccgaattcgtccatcgcaccagaaaagataagtgcttcaagcattttgcgatttacgctttttgacggcacgcgaaagcagaaatcgaaaagatcttcaaatggtttctcttttcttgctttatatatatctttgactgctgagacgcctacactttttatcgcgcggaggctgtatctgacagatccgttttcaactgtaaacggaaaactgcttttattcactgacggaggaaggatacgaatcccgctcccctttgcttcgtaaagatattgagagattttatcctcattgccaatgacgcttgtcagcaatccgcacataaaatataacggataatgagctttcaaatacgcaagctggcacccgatcatgctgtatgccaccgcatggcttctgttaaagccatagtttgcgaatttgacgattaaatcgtagacctcatttgcagtgtctacagaatactccttttttaagcacccttcaacaaaatggcttcgctctctgtccaggatttcttttttctttttgctgaccgcccttctcaataggtccgcttcgcctaaagaaaaccccgccatacgggaagcaatcatcataatttgttcctgatacacaatgacgccatatgtatcttccaaaatgctccttaaatcttcatgaggatagtgaacaggcgcccgaccgtgtttacggtcgataaataacggaatattttccatcggacccggccggtacagtgcattgaccgccacaatatcttctaggcccgaaggtttcagccgtttcaagacgcttctcatccctgcagattcaagctggaaaatgcctgtcgtatccccttttgacagcaaggagaacgttttgtcatcgctgtaggaaatacttgaaaggtctattttaatattttcttctttttcaatcattgaagtgatggattcaataagtgtcagattcctcaaacctaagaaatccatttttaaaaggcccaagtcttcaagatggtccatcgcgtattgcgttaaatagatcccttcatgcccttcttgaagcggaacaacatctgttaacggttcttcactcaggacaacgcccgctgcgtgggttgatgcatgccttggcagcccttctattttccgggcaattgaatagacttgctgaagcaggcttgactcccgaagccgcttatccagctgcggtgactgctgtctcgcttcatccagcgtcattcccggtcttgaaggaatgagttttgcaagctgatctgcctccttcgggctgacgccgaatactctgccgacgtcccggagcgccgcctttgccgcaagtgttccaaaggtgataatctgtgcgacgtgcattgcaccgtatttctgctgaacatattgaatgacttcatcccttctagtatcgggaaagtcaatatcaatatccggcatgctgacgcgttcgggatttaaaaatctttcaaacagaaggtgatgcttaatcgggtcaacatctgtgatatacagcacatatgccacaagagaacccgccgcagaaccccttcccggtcctgtaacaatccctttttcatgggcgtgcttcataaaatcccacacgatcagaaagtaatcgctgaacttcatccgcttgatgacatcaagctcatattgaagacggcgaaggtatcgttcatcaggcttgccgaaacggctgcggagtccctccatacagatatccgttaaataatcatcagcggacgttccgtctggggtcggaaaagacggtagacgggtctgcccgagactgacgtcaacccggcattgttccgcgatctctacagaagcttgcagtgcctcgggatgctctcgataaatgttttgcatttcttcgagtggtttcaaatcgagatcaggcaaatcttcagcgggtgcatccgtcagtttttcccccgctttaatcgctttcaaacaacggtaggcagccttatcttccttccttatgtaatgcacatcgcctgtggccgtaacagggatacccgtttcttctgacagctttagaatctgctcagacaagacttgattccctttaaaaggctgataggagaaataaaaagctccctttccgaatatagactgaaattccagcgaggcttgagcagcctgttcgaacagccctccttcaagaagcgtttcaatatatcctttttcgccgggcgttattgcgataatcccttctcgataactgtgaagccatttcggcttcagtccgccttttgatttagattgcagaacgctgctgattttcagcaggttttgatagcctgtattcgattttgccagcaggacgagcgggtatgcttcaagctcgctgtcatctgtaaaaacagaagccgtcaaaccgattattgggttgatccctctcgccttgcaagctttataaaattgaatagctccgtacatgacatgatcatctgtcagcgccaaagacgcatatccgagcctgtcagcttcactgacgagttcttccacagccgcggcgctgtttagcaggctatacccgctatgcacttgcaggtgaacaaaagacatgctatcacctctttctcattacgatccatttcttccttcattataaggccggtttccaaaagaaacaaatgttcttttttgactcatcatcatacttgtcctgaaagctcaatatgatataaaaggtgaggtgataaagatggatcaggaagcaggatttatggtgaattttatcaatagctacttcattgcgttaggggtgctgatcgggggcgcactcatcggagggctcggagcatacttggcaggcgaacccccgcttacagccattacaaagcttgccaaccggttaaaaatatgggcgcttgtcgcagctatcggaggcacctttgatgcggtatacagctttgaacgcggcatactcgaaggcaatacgagagatatctttaaacagcttcttttaattatttcggccatggggggcgcgcaaagcggctggcttattatatcatggctgacccaggagcatctttcttcatgagggtcccccagcattacaaaaaaccgggatggcagcgttttttcgcgggaatgatgtgcggagccgtaatcagctggttctttttcctgtttacttacggaacattccaagaggagcaggtcagcctcatcgaaaagcaaaaagagcatgtaaaagacttgaacaatcaaatttcgatctatcaggaagacctccataaactgaatgaagataataaaagaaaactgctgattcaaagcgtcagcgtcaaattgctgaatggggataaatataaaatatcacagccggataaaacgaaattcgaggagcatgtaaaggatgatatttcagaggtgattacaaaagacatagagagcgtctatcaaacaaaggatctcttgaagcggacaattgaaaataaagtctatatgatcaatgaaaaaaaatacgaggcaaccgtcagagaattgattatttatacgaggctgacagtggaacttgaaatttctttcgccacataattatggattttttttaaattctccaaacttctgtcgctttttcccattcttttttataaactatatgtgaggcttaatggcgaaaggaaggaggaagggaaatggaggtttacagtgaccgtcagttagcaaaagatcaagcagcccgtctcagacaaggtttttctgcatatgccgaaacaaactcactcgcttccctcatcaaaaaagaacttcaatcacacaatctccaagtctacgaggaccttactgatttcggctgctggttcatccccgtcacagatgaacactaagagagagggtctcccctctactcgtgttctttacataatgtttccagatcagctaaaatacgatcagcttcatcccagctgtaaatagaggcgcctgaagctaacggatgccctccgccgttatatttccgggcaagtccgttaatgacaggccccttcgaacggaatctgactctgatttgatcgtcttcttctacgaaaaacacccaggcgcgaatacctgagatattgccaagcgtcccgacaagctgcgacgcttcagaagccgttgtgccgaatttttcaagcgtatcctttttgatgaaaacagaagccgccccgttttcggacaaagacacattttgaaagataaagccgttaagcttcaccacattcagttttgtttcatacaattgattaaataactctgaggaagagaatggatactgaatgagctcgcctgcatattttagtgttttttccgtggtattcggaaataaaaagcgtccggtatctccaacaatgccggcgtagatcagctctgccgctttcgtattcagcttccagccgtgctcttttccttctaaatacagctcgtaaatcatttcacttactgagctggcgcttgtatcgacccagagaaggtcaccgtatggatcttcgttcggatggtggtcgattttcattagtttggcgcctgaaggataacgctgatcgtcgattctttcctgatttgccgtatcgcagacaatgacaagtgcgccttcatatgtttcattgtccacctcatcaagggaatataagaaagagagggacggttcaggcgtgccgaccgcaaaaatatttttttcaggatatgtttcacgcaggatttccgtaagcccacactgtgatccgtaggcatccggatcaggacgcacatgtctatgtaagataatcgtgtcatataatgatatggttctgatcaattctgttttcatttgatactcctttattgtttttattcattaaatcacattctctgccgacggaaaagaaaaataacgtcaaaaccaagcccgtttttgtataaaatggggttgtaaacttttacgatggaggatttcatttatgctggttcttgtttttttgattgggctttcagcctgcttttatgtgtactataaagtaaaaggcgtacgggcaaagccatctttggcaaaagaaatatgttcagcaaaatcaagcatggccttagggtcactagtcctgttctacgggcttaaccaaatgatattattccattcagtattaacgttagtaatcggcggtatctttatcgtcataggagcaggaagcgcttgggcaggttataaagccttcaggcattacaatccccttcacgccaaagaagctgaaagagatcacgcgtaaggggcgcctgaacgtcccttagcttctttccatcagctgaaccatcagcatcgctttagacacgatatgaccttggctgtgcacttccacttccattttcccaaactttctgccggcctccaagatgcgaggtttgacttcgatgactgattccatctgcacaggcttcaaaaagaagatggtgatgctctctatgacgagttcgccgcgttttttcgagcgcaaaaatcggtttgccgcttgcgtcaaaatggtcgtaaatacgccataagaaatggttccaagctgatttgtcatttgcggcgtgacttcatactcgtaaaccgtttgatcttctttatcatcaccctcatctttaaacccccttgaaacgatatcatcaagcttctccccgacctgcggctgcttttgaatcatttgaagagctttcaatacgtcttggcggctgatcatgccgatgagtttttggtggccgtcagtgacgggaagcacttcgatcccttcccataccatcatttgcgcagctgaagcgacagatgttttcccaataaccgtgacgggatttttggtcatgactttttctatagatgcatttcggtcatggccagcaatatcttttgatgtcagaatgccatggattttcatttgatcgtcgacaaccgggaagcggccgtgccccgtttcaaaatttttctcataccatttttcaagtttatccttaggcgaaagatataccgtgcggtcagcaggtgttaggatgtcctccaccaaaacaatttcttttttgatcagctggtcatatattgcccggttaatcatcgcggcaactgtaaaggtgtcatagctcgtggataaaatcggcagttcaagctcatctgccagctgcacaatgctgtcatccgtgttaaagcccccggtcaccaatacggccgcgcccgcttcaagcgcctgcctgtgtgcattgattctgtttccgacaatcaaaagattccccgctgcggtgtaacgcatcatcgcgtcaagctccatcgcgccgatgacgaatttattcaatgtcttatggagccctgccctgcctccgagcacttgtccgtctataacatttacaacctctgcataggtaagcttttcaatgttctcttttttcttttgttcaattctgattgtgcccacacgttcaatcgtgctgacaaaccctttattctctgcttccttgatcgctctgtacgcggttccttcgcttactttcatttcctttgcaattcttcggacagaaattttttcaccgacaggcagtgaatcgatatacgttaaaatttgttcatgcttcgttgccaagcctttcacctctaaggacagtcttcttgtttttattataaggtttcaaaggatttatacgcaatgaggctggaaaataaaaaagaagcccgaccggcttcttacagcgttgatttcgttccagtcaaacgcaaggaccacgtgattccttttacatcgtaaagcggaaaaacctttatttttcttttaaatggacatcaaccgctgtcttaacaatatttcgattccctattttagataaaacaaataaaactgcggatagccatatcgcccctatggccgtatagatcaatggatgaacagctgtgtttgcgatccattcatttattaatgttctggcatttaccagaataataaatcctcctacaagcacacccatcaattgcggatgaaacttctgcaccagccatgctgcgataggggcagcgataattccgccggccattagtgaaaacacccataaccaattgacgtcctcccatcctaatgaaataagaaaaccggcggttgcagatacggcgatggcaaattcacttgtgtctacagtcccgacaactttcctcgggctcaagcctttgcgggataataaaatcggagtggtcaccggtccccagccgcctccgcctgtggcatctgcaaaaccagcgatcactcccaatgggatggattgttttcggtttaacggcacatgcttcttctcaagagccggcttatattgaaataaaaacctgatcaatacatatccgcccagaaggagcaaaaacaaagaaatatagggtttcgccacatctccaggtaattggctgaggaatgccgcgcctaaaaaagcgcctatagagccgggaatgacaagctgataaacggtttgtttgtcaacattgccaaatttaatatgcgacactcccgatgcggcagtcgttacgacttccgctaaatggacagaagccgaagccacagcaggtgtgatgccaaacgccaataacaaagaagttgaggtaaccccataagccatacctaacgaaccgtctattaactgcgacaataaaccaataaatgcaaaaacgattaatttcttcatcagaacaccccatctatatcaatcagatatttttgactcttcattcgaatctaacaatctcttggcgctttcatataaaaaataagaggctttgataattgcagtttcatctattgtaaatgcagggtggtgccaatcatgatcaccgtctgttccaaaaaacgcaaaggatcccggaatatgctcaagataataagcaaaatcttcccccgcggttgatggggcgggatcaatgacttgaagtttcgctttatgtgcagcgtctcgcaccagccccgtaattgcctcatcattacaaagcggcggcggtccggaatgccacttcacatttgcctttaacgagaaagcggcagaaatctgctctgtgactgcaaaaaaacgctgtttcacttgattacgaacctctgaatcaaatgtacgaacagtgccctcaatgaccactgtatccggaatgacattccaagtgctgccgccgttgattttccctacggttaaaatcgcgctttgcagcgggtttacatttctgcttacaatcgtttgcagggcgacaataagctgagaggcgccgataattggatcaaaaccattatgcggcaatgctgcatgagcacctttcccttctatctctactttaaatcggtcaacagcagccataagcgggcctgtttttaaccctacagtcccaaccgcgatatccggtttattgtgaaggccaataaccgcatcaatgccatccagttggccgtcctctatcacttttgtagcgcctgcacccgcttcctctgctggctgaaataataaacgaatctttcctttcagactgtcttgattttccttcaataaaaaggccgcaccaagaagcgctgccgtatgaaaatcatgaccgcacgcatgcatgatccctttatgtttagacgcataaggcaatcctgttttttcttcaattggcaaggcgtcaatatcagccctcaaagcaatcgccggaccttctgactcccctgctatgtctgcgaacacacccgtttttagagcagtagggcgaatctgtatccccttttctttaaggcatttttttataaaagcagttgtttcaaattcttcttttgacagttcaggatattggtgcaggtgccggcgaatgccgatgagctgcttttctagcgttgagagatttacgggattagactcctctttcaacgtcaggatgtcatttcctgtagtctgatatggataggagccttctatatttctccaataatccaaagacatatgttccgctcctttccctatcccaatatattttcttcagactcttcaacataagatgaaataaatcggttcaatttatcagcaagaccgcccgccccaaatcttatatacttgctggaaactttcggattatcttctttcaaaaagcttaaaaaagataaaatataaatgcgcctgtaagctacttgtgtaattccgtactcaaaaaaccagttatcaatgacattgtatacgcctcggttgacgccatataggttattacatttcttgtaaaagcagagatccggaagatttaactcctgatgggaaagaaggctttcttttttgtttggtgccataatcccaatcagctcaaagcgttttgcaacgcacgaaatatcctttttaatttgctttgttaaagactccaaagaatcaaaccttctttcttctctaattttaaagagaatgctgcattcgattttttctccataaatgtctctatgaaagtcaaacaaaaaaatctccaatgtcttttcaaggttagagcccaccgtcggtttcacaccgatattcataacccctaaatgaaattgatgattgactgtcgccagaaccccataaactccattacgcagcccatgtatttttgcatctacatttgccgtggggaatccaagctttctgcctaattgttttcctttcacaaccgtaccggcaatgatcgtcaaaaaagtcagcctcctctctcagcttccgcattcgatcagacgaaacctaatgatgtgatgaatgtaaaacggattgatgctgcggaatgccaagaccgagattttcccgcaatgtcccgccgcgataatcttgacgataaagccctctttcttgaagaatcggaatcaccttttctacaaaagcatcaagtgttcccggtatatccgacccaacgataaacccatccgccgcctcagcgttgaaccaagtttcaattaaggatgcgacacgctctggtgttccgatgaatagagtccgtggaaaagccatttcctgtgctacctcccgcaatgtcagatttctggcttttgcttctctcttaatccggtctgttgtgctttgaaacgcattctttcccacatcgccaatatcgggaaatggctcatccaacgggtaaacactcagatcataatcatcaaaaaaacgggccaaataagtaacagcattttcaatcggtatcaattctgcaaattcacgatacttcttttccgcctcttcttccgtatctgccacaatcgggctgatccctggaaaaatccgcacacttgaaggatcacgcccttcatcagcagctcggcttttcacatccgcataaaacgcttttgtctcttctaatgaattggaatgggtaaaaatcgcatccgcatttttagcagcaaactgccggcctgtttctgatgaacccgcttgaaacactacaggctctccctgcttagagcgcccgatattcaagggcccctctacttgaaaatactttcctttatgattcaggcgatgaagcttcgcctgatcgaaaaactgccctgttttcttattgtgtataaatgcgtcatgctcccaggaattccacagcccgcgcacaacatccaaatgctcttgtgcgatctcgtaacgttcagtgtgttctggcaaattagacttactatggttgcgcgccgctccttcctgcggcgaagtaaccagattccagccggccctgcccccgctgatatggtccagcgacatcaattgtctggagatagtgaatggctcagtaaaagatgtagagaacgtccctactaaaccaatatttttggtaaccgatgccagcgcagataaaatggtgatcggttcaaaacggtttaaaaaatgaggaatcgatttttcagaaataaataagccgtctgcaatgaaaataaaactaaacaaacctttttcagctgtttgcgcctttttcatgtaaaattcaatattcgtgctggccgagggatcaacatcgggatgacgccagccgtcagttgttcccccgacaccgtgaatcatggctccaaactgaataaaatctgcacgtgtcatctttttgcctcctttatctgtgcatgattagcaagtgcaagatcaaggtgttcaatgccgatttcagttatcccttgatactgattgccgcgcccgatttcgaccacaggcacatggcgcaccccatatttcacctgtaaaatatcccgaagcttttctttctctgaaacatcgatattttggaacgggaaccctttttcattcaaataattcttgacttcctcacaatacgaacagccttttttactccaaaccacaatgttcacaacatcactcattcttctgtccctccttaacgttttgcagctaaaactgcatcgctcagcagctgataagacagctgtttttctacagcatttttgatcggtgtaaaaataacaaaatcattgattttgtatgtgcctgataaacgtgttaattcttctgccacttcttcctttgttccggcaataatcccggttttttgcacgatgatgtcatagggctctgtgacgttttccagataggcctcagcctgttcgcgggaaccgacgttgaccttacgcccgtctttcaaaaccacttttatcgattcacgcgacacaatatgtttttccgcttcttcttttgtatgtgccgcaaaaacagcgggggcaagatgaaattcagcctcagatcctggcgggagatgcgcgtcaaatgctcggcgggcttccttcagcacttcctcttcaccgttaataaagtaagcaaagacaaaagagattcccagttttgcagcagaaatggcactctctgtgcttcctcccaatagaaaaatacccggcttccgatcaacctgcggcctaggacgcaatgcggcatagcggtgggtatcaggaaaatcatcccgaacgaaatgagtaagctcctccagtttttcatcaaactgacgcaccggttttttatattcggcctgcagcgcgtctgtggacagctgaaacccgccgggcgctttgcccactccaagatctatacggccgggagctaacgctgatagaagatggaattgctccgctactttataagagctgtaatgctgcagcatcactccgcctgatgctaaacgaatttttcttgtgcttgcagcaagatagcctaaaagaacctcgggtgcagaccctgcaatctcatcattgttgtgatgttcggccacccaaaatcggtgatatccacattcttcagccatttgtgccaatttcactgtatgctgtaatgtatcagctgctgtctccccttcaccaatcaagctttggtctaaaatacttaagcggatcatatcaccggctcctttatgtgttcttttggttcaaataaatattccggcgaaacacggcggagaaactgcctcgttctgtcttttttggtatggcggaagacttcctccggggttccttgttcaacaatgactccttcatccataaaaacaacttgatcagagacccttcttgcaaactccatttcatgtgtaacaacaatcatggtggctccggttttcacgatttccagcattacctcaagcacttcaccgaccagctccgggtcaagcgctgccgtcggctcatcgaacagcagcacatcaggatgaatggcaagcgcccttgctatccctaccctctgcttttgtcctcccgataactgactcggataagcgttcaatttatcttgaagcccgacctttctcagttcattttccgctacggcatacgcgtcttgttttctcattttccgggcaatcgtcaagccctccatgacattttcaatcaccgttttgtgagcaaacaggtggtattgctgaaataccattgccgtctgttttctgagccagtgaacctcttttttggacggaaagcggcaattaatcactttgtcatgtatagaaatgatcccttcgtctggacgttctaataaattcaggcaccgtaaaaaggtggttttccctgatccgctcggcccgataatcgtcacaacttctcccttgcgtaccgtgagatttatcccttttaatacatggtggatgccaaactgtttatggatatttttaatctcaatcataaagtgcctccttgaaatctggctgcctttctctctaatactccatttgcggattctaggattagagtcagcacccaatagataatcgctgctccgataaacgcttctaaaaatgcataattatcagaagcaacgatagtcgccgtccctgtaatctctgggacagccactatagccgcgatagaggtggtatgcaaaaagccgatacccaaatttgtgaagtttgggatggaaaccttcagcgcctgcggcaatattacacgccgaaaggtttggctgtatgtcaagccgattgaataagccgcttcgacctgtccggtatccatcgccagaatgcccgaccggatgatttctgtgagataagctccggcagttaaagacaaggccatgatgacaaacatggagaccggtatctcattagcggaccagccgagatgaaaaaaactgctgacttgatctgcaacaggcggtatccctaaataaatcaacataatgtgaagaattgcaggtgtacttcgaaagaaagacacataaaaccttgagcaagccaccaagcccttaattctaaaaattctaacaattatatttccaagagccacgagaaatccaaacacaatcggcaaaacagccatcatcaatgtcagaggaatggtctttaccatttctttcatggcggaaacgataaatggaaagtcaaattgcaatcttctcccccctcatccgaagaaatatatcaatgtatgttcatgtcaaaaacagtaacaatccttgtttgattcttcttgattcgtttttctgccactcgaaagaaccattcgaataaaaccgctacagcataataaacaatcgatagcgcaatgtaaacttcaagagaatggttgcttgaggtaatcagtgtttggccccttccggacatatccataacacctattgaaaaggctagagacgtatcttttaaagaactgatcaccatgtttcccatattcggaaacgcctggacaagtgcctggggcagaacgattcgcctgaaggcctgactaccgcttaagccaatactgtacgccgcttccgtttggcctttatctacactgcccacccccgctcgaatgatttctgcggctgccgctgcattgcttaacgcgtaggttgcgacagcagcataaaacgggtccatttttgatgtatcaatcccgataagccccgtaagcgccgggatcccgtaaaacacgatgaaaagctgcaccatgataggcgttcccctgaaaaacgagatatacacttttgccaattgatttacaattggaatattatagatgcggggcagtgccagaaagagtcctaatacaaaaccgaaaagcaaggacagtgttaaaatgtataatgtaaccggtaaataagcggttaacgtcggcacaaaatctccaatcatgttcatatcaaacgctttttccatcactgctccctctctttttacctaatactgctctttggaatagtcgtcaccaagccatttcaaactgagccttttcaacgttccgtcatcaatgatttcctgtaaggctttatcaatatcgtcacttaacgtttgttcatttttgttaaacataaaatacactttggcatttgaaagcacattaccgacggttttttctttaatagtgctcgtcttgttttgaaagtctactgcaaaaggcgttgagatcgttgcgtccgcacgccccgatttcagctgattcgcagtctcatttgcgccttggccctcataggcaatctcaaacggccgtccattatcctcattccattttttcagtacaagcgctccgttggaggttgcactcgtaatcacccgttttccttttaagtcttcaattccacggatcgtatcgttattttgaagcacagtaatttttaaaggaaaatggttgtaagcaaccttgttaaacagaaattttttctcacgctctttgcttttctccatttgatgtgccacgatatcgactttatgctgtccgaggctgacaagcaggttggaaaattccatcgttttaaatgtgaatttataatgtggcaggcgcttatcaagctctttgatcagttcgacatcataaccggttaaatcgcctttttcatcgataaagcaaatattcggaaattgggttccagttccgaccgtgatcgtctgtaccttcttttgcccggctcccgtcgtttgactgcctgcaccgcaagctgacagaactgttataagcgaaaataatattgccatgaatgctgttttcgttttcatctcatcgccccatttatttttcaaaacttgattttgaataatctgccccgagccattttcggcttagtttttttagcgttccgtttttctccagctttttaatcgcttgatccgtgtcatccgccaaggtttggctgcctttattaaacataaagtacacctcggtatctaataacacgtcaccgactgtcttttggcggaaggcgtgcgttttattctgaaaatcgacggcaaacggtgtagctatcgttgcatctgcgcgcccggtttcaatttgattggcggtatcattgcttccctgtcccgcatatttcaaatgaattgggctgccgtgcgttttgttgtactttgtaatataatctgccgcatttgacgtggcgccaactatgactgtttttccgtgtaagtcttttaatgtatgaatcttgtgattatcctctttcaccgtgatgtacatcggcgagtagttatatgggactttatgatacaaaaaacgcttttctcgttctttatttttggccatattgtgcgcaatcacatcaatttttttatttccgagactcgtcagcaaatttgagaaatccatcgttttaaattcaaatgtatattgaggcaactccttatcgatggctttcatcacttcaatgtcatacccggtcaattcacctttttcatttaaaaacgcaatattcggaaaatctgttccagtgccgactatgaccgtttgagcctgacgatctgttttgttatttgtttgcgaacatcccccgccaagtaatgcaaacactgacagcagcaaaaccaatcctttacgcttattcataggctgcctcacatcatgcccagctgggcgcacctaaaagcgttgggttaaatcgttccggaatcagaaccttgtgcatcatcacacctatgtccccgtctttttcctgctcaaaatacacttcataccctctccttctgtacatgtcagcaagccaaggatgcttgcgcgccgatgtgccgagtgtcagcgcaggagccttcagcatatctcgaagcactttttcttcaacatacgtaagcagcttacttccggcgccttgccctttatattccggcagtgtcgcaaaccaccacacaaatggatattttgaaggaggcgtctcactctcccacgggaacctgattgtaatcgttgaaatcagcttcccatcccgctccagcacaatcgctgaatgatgttcaatattttctgataccatttggatatcagctctcgtggatggccaatcaatatccagctgccgaatgggctgaaatgcgctgttaaccagtttcaacagctccgatgcatcttcaacagttgccagtcgaaaaatatcatcactcatttttgtcactcctcttcacaaaatatataattcctatttgtttactaagcttttattgtttatactataaagcatactctgatctttgactaatcaaaaaaagtaaaccttcacttcagtaattttaatgatgaaaaacaggagggagcacattggagttacgctcaatcaaaacgtttcatacgattgtaaaatttggaagcttctataaagctgcagaaatactcaactactcgcagccgacgatatcgatgcgtatgaagcaattggagcaggatttaggcgtactgctgtttgaaagaggaaaaagcctgcagttgacaaaagcagggaagcttttttatgaacgaacaggagatcttttgatgcaatacgaggcgcttaaacacaacctctccgacttaaaggaagaagaggcaggcattatcaacataggggtttcagagccaaccgccagtctgatattccccgagattttaaaggatttcttaatggattacccaaagataacggttaatatcaaggttgatgacgccaatacctgcagtcaaaagctcttagacgggacgattgattttgcagtctgcggcgagccggagctgattcttgaaaattactaccatccatttttttatgacacattaaatgtgattgtatctgatcaacatccgctcgctgagaagaaggctgtccatttgtctgatttagcagaagagcgcttcatatttacgcccgccaattgccccattcgcttacaaattgaacagcatttacatagagaactcgggaatcgctacaaaaaaatggagctcacaagcagcatgtcacatgaatattacgtacgtgaaaacatcggaatttcaatctttaccagcaccgcacattctaaaccgttcaacggcactaaagtcattccaattctgaacctggatatcaccccgcccatagggctgttgacaaatcaaaaagaagttcattttgaccgcgccacgaaggacttgatcgcccggataaccaaacgttttcagcagcgcagcaaagaattggaaggaacctctgataagaccattacaggataactgaaaaaataaaaaccacctcctgattcatcaggagatggtttcacggtttaaagctcgatcgtctcaccgaccgacatgactttgccgactccgcccggcaggctgtcagcgaatgcttctgggtcttgttcgatgaccgggaatgtattgtaatgcaccggcacgacctgttttgcgcgcagccattcagcagcaagcttggcgtcttcaggccccattgtaaagttatcgccaatcggaaggaaagcaaggtcgatatgattcaattcgccaatgagtttcatatcagagaaaagtgccgtatcgcccgcgtggaaaatcgttttatcttctacagtcagcaaaataccggcaggcatgcctgtgtaagtgatcgttttgttttcttcatctgtgatggctgatccatgaaaggcctgtgtgagcttcacttttccaaaatcgaactggcgggagccgccaatatgcattggatgaacattcaagcctttccagcctaagtacacagcgagctcgttcggggctataaccagcgcgttattttgcttggcgatttgttcagtatcaccgacatggtcattgtggccgtgcgttagtaagatgacatccgcttttacatcctccggctttatatccgttaatgaattccctgttaaaaacggatcaaaaataatatgatggtccttcgtttccactgtgattacagaatgtccgtgatatgtcactttcatttctttcacctcgtcacatgattttgttttttttattttccctttttaaaaagctgaaaaacttatgttgtttgattcttgttaatgacattgaggcctccggtggcttcaatgacagtccctgtcacaaggtctgagttctcctcacacaagaaagcgataatcctggcaatatcctcgcctgtaccggatcttcctatcggcgttttttctttgccgattcgcattctggcttcctctatcgatgcttctttcatgtcgccgacaatgtctcctgggcaaaccatgttggcggttatgccgaattcggcttcttcaatggcaattgtcttcgtcaaagaagccaagcccactttcgcagcgccaaatgccgatcggtgaagccagccgggcgcgtgagccgcaccttggaatccgtacgtaataatgcgtccaaattgctgttttctcataataggaataaccgctttgaataaatgaaagacggcgcttaaatttccttccagcatgccataccattcatcatcagtataatcggctaactttttacgttcaaatatgtatggtccagcgttgttaatcaaaaagtcgatccttccgaagcggtttaaggcagcctctgcaatacgcagcagatcttcttttttggtgacatcaccttttacaaattgcagccggtcaagacaatcgggacaggcttccttcaggcggctgactgcctcctcatcctgtctgtaattgactgttactgaatacccctttgcaagcaacgtttcagtcactttgcggcctaaacccttcgaaccggcagtaattaaagcatgtcgcacatgaatacctcccaaagcaacgtcgccgctttcaataaagtgtttcttcttctactttactataaaaggcttgcaatatcactttttacactttggcatacaaaaaaagctgcctgtacagacagcttattctgcaggagatgaagactcctgatcaggcatatcgacataaccgctttgatatgcttctgaaatgagccttgttgtctcctggctttcttgttcatcataaatatagcgttccggttcttttttcatcattctgcctcccatcattatagaggtaggttggctataatgacgggattttatgaaggaaattttaacaaactcctgctgccacgcaagctttcgctttttcaagcgcctgttccacctgtttgaatccggtgcccccggcgctcattcttttttcaactgcgtagtaagggtctaacacagtgtaaatatcttcttcaaatagtgtgctcgcctgctgaaactcgccaaacggcatatcgcttaaatagatccctctttcgatgcatgtgtacacaagtttcccgaccacttcatgcgcttctctgaacggcattccttttttagctaaataatcggccagttccgtcgcgtttgaaaagtcttgttttgttgcttgcttcatgacgtctttgtttacagtcattgtttggatcatgcctgtgaagatttgcaggctgccctccaccgttttcaccgtgtcaaacatgccctctttgtcttcctgcagatctttgttgtaagcgagcggaagtcctttcatgatcgtaaacagccccatcatatcgccgtatacgcgtcctgttttgccgcggatcagctccgccatatcagggtttttcttttgcggcatcatgctgcttcctgttgcgtacgtatcgtcaagctcgatgaatttaaactcctgcgagcaccataaaatgatttcttcagagaaacgggataggtgcatcatcagcatactgctgttgcttaaaaactccaaaatgaagtctctgtcgctgacgccgtccaagctgttttcataaatggcatcaaagccgagcagttccgctgaataatcacggtcaattgggaaggttgttcccgcgagcgccccgcagccgagcggagatttgttaatccgcttcattgaatcctgaaaacgctccttgtcgcgctcaagcatccagaaatacgcaagcagatggtgagcgaatgaaatcggctgggcgcgctgcaaatgtgtgtagcccggcagaatcgtttcaacgttcgcttccgccttttcaatcagcgcactttggaatgcctcaatcagctcgatgatgtggccgacatgattcttcaagtataaatgcatgtcagtcgccacctggtcattccggcttctgccggtatgcagcttgccgccaagaggaccgatttcgtcaatgagcattttctcaatgttcaaatgaatatcctcataatcgactgagaattccaatgctccctcctctgctttttgcaaaagggtattcaggccctctcggattttcaactcttcttctgctgtcagaataccgcattttttcagcatggcagcatgtgcgagagaccctgtaatgtcttcagcaactaaattttggtcaaatgatatggacgcgccgaactcgtcgacccatttttccggtgttttttgaaatcggcctccccaaagcttcttcatgctttaatctgctccttctttttcacgatgctgttcacttttgtcggaagtccccaaagctcgataaatccgattgctgcatggtgatcaaatgcatcgtcttttgtatatgttgcaagtttttcatcatatagagagtattccgatttacgtccttctacaattgcatggcctttaaacagcttcacgcggacaatgcctgtgacatgcttttgcgtttcttttaagaaagcgtgcagcgcgtcttttaacggtgagaaccataagccgttgtaaatgatttctgacattttttgctcgatgatcggtttaaagtgggctacctctttcaccagtgtcaaatcttctaattctttatgcgctttgatcagtgtcatcgcaccagggcattcgtatacttcccgggatttaatgccgacgaggcggttttccacgtggtcgatacgtccgacaccgtgcgcgcccgccatttcattcagcttcaagatcagctcagaaagcgagtaggaaacaccgtcaatggagacaggcacgccctgttcaaatgcaatttcaatcacttccggcgtgtccggcgttttttccagcggagctgttaaatcgtatgcaccttctggcggcgccgcccatggatcttctaaaatgccgcactcattggcgcgtccccagaggttttggtcgatagaatacgggctgtcaagattgatcggaatcggaatgccgcggctagccgcatattcaatttcttcttcacgtgaccactgccattcgcgaaccggcgcgatgacttctaggtcagggtttaatgatttaatggagacttcgaaacgaacctggtcatttcctttccctgtgcatccgtgggcaatcgcctgtgcatcttctttttccgcaatttcaaccagttttttcgcgatcagcggtcgagataatgccgaaacaagcgggtattttccttcatacattgtgtgggcctgcaaagagataagcgcgtaatcctgtgcaaattcttcttttgcatcgatcacgtaggagtttgtcgcgccgacttcaagcgctttctgctgaacaaatgccaaatctttgccctcaccgacatccaggcagcaggcgattacattatatccttgctcctgaagccattttattgcgacggaagtatcaagacctcctgagtatgctaatacgacttttttctgttctgacatgataaaaatcccctctcaaccgtgtttctattttgtataaaaataaattatatttaataaaaatacattttgtatgtatacactttaacaagtacgtttcgttttttcaagccttttataaaaaaaacttcacctaaatttcaggtgaagtttcatagtatttattcatttacttgtcttttctgatttctctgaccacatgcgcaagttcgggaataatcagcttattcattgccagctttactgcgccgcttgagcctggcgttgagaaaacagcggtatgctgaatgacgccggcagttgctctcgacatgattgcggcagagccgatatcctctgtataactcagcatcctgaatatttctccaaagccgggcagttctttcgaaaacagcggcgttatggcttcaattgtgacatcccgatctgctatgcctgtccctccgtttaagagtaccgcgtctgtctgttcatccatgcagcccgcaagcactgaccgttgcaaagcatccttttcgtcttttacaatttcatatgcggcaatatgatgaccggcttcttctaaaaatgagatcatcagcttgccgcttttatcggtttcatctgtcctcgtgtcactgacagtaatcactttgcaccgaacgatatcgggagcttcttgtttatgctcttgaacgctcattggcccacctcttttatgttttctgtctgtcactatcatgcatcaacaaaaaagcacattcaagagaatgtgctttcatgcgatttattttgctaaacgaacaacgtcgcgcgcaatcatgacttcttcatcagtcgggatgatcatgacttttactggagaatgcggatagctgatgaaagcttcctcgccgcgcacgttattaagcgcagggtcccagtatacgcccatgaattctaaaccgcgaagaacgcgttctctgacttccacactgttttcaccgataccggcagtaaagatgatcgcatctacaccgctcattcttgcagcgtaagaaccgatgtatttgtggattctgcttgcgaatacttcaagagccgtttccgcgcgctcatttccttctttcgtagcttcaacgatgtcacgaagatcgcttgagaaaccggaaatgccgagcagtccgctttttttgtttaatgtattcagtacttcgtcagccgtttggcctgttttctccatgatgtatgggatcagggcagggtcgatgtttccagagcgtgtgcccattgctacaccggcaagcggcgtaaagcccatggatgtgtcaatagattttccgccttcaacagcggcaatacttgctccgtttccaaggtggcaggaaatcaggcgcaagtcttttaacggacggccgagaagctctgccgcacgctcagttacatatttatgtgaagtgccgtggaagccgtatttacggatgccgaatttttcatagtattcatacggcaagctgtaaaggtaagactgctcaggcattgtttggtggaatgctgtatcaaatacagctaccgcaggaacatttggaagcacttctttgaacgctttaattccaacgatatttgccggattgtgaagcggtgccaattcagaaatatcttcgatttccttaatggtttcatccgttaataaaacagaatcgctgaatttttctccgccgtgaacgacacgatggccaattccgtcaatttcattcaagtctttaataatgccgaattccgttaacttattcagcagcattttaacagctaccgcatgatctggaatatcagttacttctgtatttttttcgccgttcacagaaattgtgaatacgctgtcggcgataccgattcgttcaactaaacccttcgttaaaacggtttctgaaggcatttcgaaaagctgaaatttcaaagacgagcttcctgcgttaattgcaataattttggacatgattgacgctcctttatactctgtatcaacaacttcgtttttcgtacttttttcccggtgaatatcaacatcttctccgaaaaatatctgacttttccatttaaacattgtcatgtcggcttttcaagtcaacttgcgtattgataacgcttacaataagaagtcgttattttcagacacattcactataggttttgtattgatgaacgcttacaatttgcggtttttccctctgtattttgtgtttcaaagctggattcaattcgtcaagtccggtcttcaaaagcataaataaaagcagcttaggcatcgacctcatacggctgtctaagctgcttttaaaacacttacttttcttttttaaaccattcatcaaattgagccatcatatcaagcatcgccttttgattggagaaagacggaagattcgcaagcagaatttgccccggcgctttcgtattctctccttgtttctgaagcacaaggatgcttttggcatgagcttcgtctttaaaaatagattttggcagctgcaacagtgcgttgatatgaaccttatctttgaaaaactgtttcagcttgccgctttgggagctctcaaacaaatgattcggaatcataaaaaataagtagccgcccggtttggtatgcttgacgctctgttcaataaacagatgatgagcgaaggaatggccttcgtcagctttgagctcaaacgcttctgctccttcgtcattcggataatagccgactggcagatcacaaatgaccgtgtcaactggatcgataaacaacggctcaaggctgtcctggtggaaaagctcaagctcttttttcagaaggttcgcttgggcataggcgatcttcaagagcacatcatcaatttcaatgccaaagctgtttgccgttttttcagacagctggttcagcacggtaaacagaaggttcccagttcccagggctggatcaagaatggtcagttcctttttgtccgccataaatttattcaccaaatagctgatgaaaagcccgatcgtatccggcgtcatttgtctgtttggatgcgagatatctttcattcctttaaggacggcaagctgaaaagccttgcgtacccactcatgctcatacgtgccgaattccgctttttcaagcagagcctgaagttgtttggttttctgatcagcaggcagtttcagctgatccgttttttcaagaaaatacatttctcctgcttcggccagcgcctctatatatgaaatctgcaattcattctttatcataatcgcggcttcgtttaacagctcatacaccgcacctacatggtctttttgcatattgtgttcctccttgccatgaaaaaagctccggcggcagcctggagcttttttccctgcttactttactaatgccttagcagcctcaattggcttttcatagttcgggtggtttgttgcttcgcttacatattcagcgtaaacgacttttccgttctcatcaaggacaaatacggaacgcgcaagcagacgaagttctttaatatacacaccgaacgcttcgccaaatgacatatctctgtggtcagacagtgtttccactttgtcaattccgttagcgccgcaccagcgcgcttgcgcgaatggaaggtctgcactgattgtgtagacgttgacatctccaagctttgcagcttcttcgttaaaacggcgtgtttgtgcatcacaaacacctgtatcaattgaagggataacagaaataatcgttacctttcctttcatgtcagctaacgatttttcttcaaggctgttagtcagcactgtgaaatcaggagcttgatctcctaccttcacttcttgtccgacaagtgtaaccggaccgcctttgaatgtaatttcagccattataattcctcccttttgtatgtatgtctctatcatagtaaagtttcctgcaaactgcaaagtttatgccaaaaaaaagttaactgcggccagcgcagttaacctttttttaataattcatattgttcatttggttttgattttggccttggctttggtttttgttatttttcttgaacatttgctggatgcgctcgagtgtttgaggggctgcgtctaaaattttctctattaaatgggtattttcatctaaatgaagcattctgatgcctgtcgatccgacaattaaaaacgcgatcggcgtaatggacacaccgcccccgcttccgcctccgaaaggaagtttctgttctcttgtctcatcgtcttccgatttcttttcggccggctttccgccaaactcgcttccgcctgcggcgaatccgaatccaactttagaaacagttaaaatcacacttccatcaggcgtttccactggatctccgatgatggtgttaacatcaatcatttccttcaagttttccattgcggttttcattaaaccttggatgggatggtctgccatatacgcttcctccttaaactgatgaatcattctttgaagtcattctagccgacggattcttctttaatacggatagctcccgtccgtatttgacgaatttgaaagctgcaagcatagcatgtccaaagcgaaaaaagaatatacactgaaaatgggtcttggaaacagggacttgaaacgacgggatcacctcatagacaggtttattcacaaagtccaggtggtcgtagagcattgctgcgataccgcccttcacgccccatacagcaccggttaacacacctgtcactgccgcgtcctgaattccgattactgtaacccattctagttttgtgatatgtaaatgcgcgagaaaagacgcgctgattttccgcagtctggtgacctgatgcaaaagcatttcgattttattaatgctttgctgcacatcgttttgtgtaatttttttctttccgctgctttttttcattttggattcagttttttgtttgatatccactgttccgtcttctttgttcaccttaatcgccgggattgtttttttgatccttataaggccaaacagcgccgtaatcttcaaggtcaatttgtcattatcatcggcatgaagatactccagcgcgacatggattttcattctgagaagcagtacgatccctatgagaataagaatggctgtcagtacatacaccatattcttcacttcctctaggagcattatcgccaattcctaaaaaaataaacccggacggaagtccgggttatcggttatttgcggtataatttttcatgcaccacggtggtatccgcgatgtaatcatgaatcccttgttttgtaggtgaaaaggcaacaacgatatataaaatccaaatcttatcaatataccgtccaaccacttcacgaaaaatcactgtactccatgtcagcttgctatcttgcttcacagaaaccactttgaggccgaacaccattttaccaagcgtctgcctgaagtattttgtcatgagtgcgaaataggcaagatacacaataagcgttgtcacactgtaggccgagaaggtaaacatgccggatgttttcggcagatccaatacggtaaagaggggagaaacgagcaaatggtttaatccccatatcacgagccaatcaagcaggaaagcccagaaacgaacccaaaagccagcataggcatgtgtcagcagctccgcttcttgcgggcctttgatgtcattgcgctctaactcttcatatgtcgcgtccattattgttccctcctacttcgcatagagatacatcattctcggcgaaccggattgcgatagaatttctctcatattcaaaaaatcaatttcacttttaaacattttgttcgcgcccatggaaaacagtgagcctaatccgaagctttcctcataagaaatgacagaggcgtttttcaaatccttgtgatcctttttcatggccgtaatggtatcgtcataaaaaccaagctcatcaacgaggttcagttttttcgcctgccgtccgtcatacacgcggccgtccgcaattttctttacctctgctttcggcatgccgcgcccttttgaaatgacatcaacaaagccttcatacgaattatcaaccatcgattgcatgatgtttttttcttctttcgtcatctcacgggaaggagacataatgtccttatgggccccgctcttaatcgtttcaaaagaaatgccaagcttgtcggcaagctttgaataattgacgctttccataatgacgccgagtgacccggtcagggtttccggtgtcgcaaaaatcttatcagccgctgttgagatgtaatagcctcctgatgctgccatcgaacccattgacacgtaaatcggttttttcgtttctttcttgatttcttccagtttcttatgtatttcagcactttcatacactccgccacccggagaattcaccttcagaacgatacctttgaccgtcttgtcatcttttgcgcgctcaaggttttttaagaacgttctgtggttatatccgtctgcaccaagcagactgcttgagtccccattatcctgaatggtgccgctgacctctaatacggcaattttacttgagggactgccgttttccagcgtcttctcctgcgattcatccgtcagtgatgtgagatccgtttgagcgcctttgacgctttcaaagaaactcatagagatgctgacgataatagacacgccgaaaatccccagagcaatcactaatgcaatccatctttttgcattcattttttctcctcctttttcctaaactctctcattatacgattcaatatgaaaaatgtttcacttcatgagaaagctccggcttaacgggctgccggcaaacgtggtacacttatggccaaaggtattttatcacaaatactggatggcagaaaaacttaaatatgacagcaaaggggaaatgggatatgaccgatcaacgccgtaatgtttatttttttcacaaacaggatcaggaaacgaacgaacaagcccgctcgttaacacaattagcggaagagcatggatttaccgttgtgaaccagcactcagacgccaatattatcgctagcattggcggggacggcacatttttgcaggcagtcagaaagacgaattttcgtgacgactgcttgtacgtcggcattaccaaaaaggggaaagctcatttatattgcgactttcatagtgatgagcgagaaaaaatggtcgatgcaatgacgtttgaacaaattgaagtgagaaaatacccgctgattgaagtgacagtggatcaagccagtccttttcactgcttaaacgaggtatccatccgctcaagcatcatcaaaacctttgtgatggacgtgctgattgacgatctgcactttgaaacgtttagaggtgacggaatgattatctcaacgcctacagggagcaccgcctataacaagtctgttgcaggagctgttgttgatccattgcttccatgcatgcaggtatcagagcttgcatcccttaacaataatacctaccggacactcggctcgccatttgtcctcagctctgaccgaaagctgacccttcgtgtggtgcaggacggcaacgaacacccaatcatcggcttggacaatgaagcactcagcacgagaaatgtgaaaacgatcgaaatcaaactgtctaataagaaaatcaaaacagtcaaactaaaggacaattcattttgggaaaaagtgaagcgtacttttttatagaaaataaaaggacaggctgctgcctgtccttttatgatttctcatatacaatctggccgttaatcacggtttttttaatctctaaaagatgaagctgtgcggggtcaatggcaaacggatcaccactgagaactgtaaaatccgcgtcatagccttccgcaatttttccgcgtgacttctctttataaatgataccggcgctaccttctgtataaagctttatcgcttcatatacaggtaaacattcactttcattatagcttggcccgttttgctcatgactgcttttccggaggaccgcggactggatccctagaagcgggtcaacaggctcaatcggggcgtctgaaccgcccgcgcataaaatgcctttagatatgagggttttccaggcaaatgcagtcttcatccggtcttttccgagacggtcaatgacccacggaaagtcgcttgcaacgaagtgcggctgaaggtcaagtgcgatcggcatgcgtgctgctctctcgattaattcgttatcaagcacttgagcatgaataagccgatcatgccggccgtttttgggcggatgcttttctattgcgttcagcactttttcaaaagcaagatcgccgattgcatgaacagcaacctccatccctttttctctcgctttgcgaatgagccggccaagggtttcgtcatcgtgaacctgaacaccatttgttgatggatcatcctgatatggttctttcaataaagccgttctcccgccaagcgccccgtccgcaaagattttcatagcaccgaactccacatacgggccggacagcttctccagctgctcccatcgatcgacagcttcatgatgaacgagcaaatggcagcgaaacggatactttccgccagcggcagctttctcataagctttcatcggcaccgaaacatcaccataataggacaagtcttccgaatgaccgcccgtcaggccttttgtccagcaatcctttattgcagccgttaatgcctcatcaacatagtgctgggagactggcgggacagccttcagaatcaaatcctgcgccttatcaaacaggagtccggtcggctcgccatttgcatcttttacgatgactccgccgtcaggatcaggagtatttcttgaaattcccgctgcttgaagagccgcagaattgacagctattgcatgccggcatatacgcttgagcaagacgggcctgtcaggaaacaggcgatcaagatcatgcttagtcaagtagtcaggtgtctcaaactgattttcattccagccttctccaatgagccaatcgtttttaggaagctgccgctctctttccttcgcagcctgtaaaattgaatctttcgacgtcagtgcggacagatcgagctgaagctgtttctcaccgtggccgatcaaatgtagatggctgtcaacaaaaccggggaacatcactgctccgttcaggctgatttcttctgtttccggcgacccgtacttttccttcaaacgttcatagctgccggtgccttttataacaccatcctcaacataaactgcctcagtccgatcgccttcttcgagcatcgtataaatgaaaccgccgtgccatatcgccttcattcacgttcactctctttctttacgcctttttattggctttgagctgttcttcacgttttcttaattccactcgtctgatttttgcagaagccgttttcggcaggctttccacaaattcaatttctctaggatatttgtatggagcggtaatcgtcttcacatggttttgcagcattttgacaagctcatcactgcgtttttcatgattttgcaggacaacatatgcctttacgatggagcctctgatttcatcagggcttgcgacaacagcacattcttttacttctgggtgcttaacaagcgcgtcttccacctcgaaaggcccgatcgtatagccggagctgataataatatcgtcatttcggctttcaaaccagaagtaaccttcctcatcttttcttgctctgtctcccgttaggaaataatcgccgcgaatttgtgttttcattctttccggatctttaaaatactctttaaagagcgcaggcgtactgaggtgaacagcgatatcgccaacctcaccaggtttgcagatttcaccgtcttcatttatgatctccacctgatttcccggtgtcggttttcccatgcttcccggtttaataggcgtatctttcaaaacaccaaccaaaagcgtgctttctgtttggccatatccgtcccgtaccttaatgccaaagtgcttttggaaaacatcaatgacttcacggttgagcggctcacctgcggaaacagcgctgtgcagggcagaaagatcaaagcgtttcaagccttcaaccttcgccattaagcggtattctgtcggagtgcagcagaaaacattgattttgtagcgatttaaaagctctagatatttttctgctttgaatctgccgtggtacacaaaaccggttgctccgctgccaagcaccgctaaaaacggactccatacccacttttgccagccaggggcagcagttgcccagacgatatccttttcagaaatgtcaagccaagcgccggcagaagtttttaaatgagcaaatgcccatccatgtgtatgtacaacacctttcggctgacctgttgtcccggatgtataagataagaaagccatatcatctcttgttgtgtcagctgttttaaattggcttccgtccgcttcaattgataagaggtttttccagccggcatcattttcaccaatagacagtgtaatcagtttgtcagccgtactgacatcccggaaagcgccaataaattcggagtagacgatagcgccttttacctctgcatgttcaatccggtattcaagatctttcgcgcgaagcatttcggagcacggaatgacaaccattcctgatttcaggatagccaaataaacagcataggcttcaagcacccgcggaaccattacaatcagcttgtctccctttttaaatccaagatcagctaaggccgctccgattttatttgtttcttccatcagcttttcatacgaccaagattcttgcttgcccgactcgtcctcccaaagaagagcggttttttgtccagcagcactgaacttttccatttcattcactaaattatattgcacaggggcaattaaatcttcacgttttaacacgaacaactcctcactttctccacccattatacataaatacaggctctttccgtaaggatatgcctaaaagcaacctctgtaaacatagattttataggccgctggtccttttttatatgtaaaaaatgaaaaagagtggggatacccccactcctaagccattatgtgaaattgtaaattagaattgtcctccgcccatgttttgttgagcaaaagatacaagacgttttgtgatctctcctccaacagaaccgttagcgcgagaagttgtgtctgctccaaggtttacaccgaattcagaagcgatttctaatttcatttggtcgatcgcttgagcagctcctggtactaaaaggttgttgctgttacctgagttattgttagccatgtgtctcacctccttgtgagtatagaatgtgtcaaaacacatggcttcattcagaaaaactttggtaattgtatacaggagctgaaaattgatttaaaagagttcagcgaatttatcgttagcttcttgttcgctataaagggtcattgtctcaatgttatctaccgcttcttgaatatacggctcgaaatcaacaaagctttcaaagtgttcaattttctcttttttagggcgtgttttcgggcttggcggtgtaaagatcgtgcagcagtcttcaaacggctgaatacttgtctcatatgtgccaatttcccgtgatttttcgatgatttctgttttgtccatggcgattagcggacgcaaaatcggtgttgacgtcaccgcattaattgcatacatgctttcaagcgtttggctcgctacctgaccgaggctttctcccgtaataatggcaagcccgtttctcttttctctgattctgtcggctatctgaagcatgaggcggcgggttgccgtcattgtgtaattttcaggaatttgtttttggatgagctcttgcgtttttgtaaatggaacaatatgaagtgtcatgcttcccccaaaacgggacagacatttcgccagatccattaccttttgctttgcgcgctcgcttgtgtatggcgggctgaagaaatgaacagcttctaccgacaatccccgtttcatcgcataaaaaccggccacagggctgtcaaaaccgccagaaagcatcagcatcgcttttcctgctgaaccaactggcagcccgcctgcacctttttcatcacgaattgtcaaaaatgttgcttcttccctgatttcgattctgagcgggatgtctgggttgcgaacatcgaccgtcaatccttctgtatttcgcaaaatatggccgccgatttcagcgttcatctggtttgtatctaattcaaattgcttatacgctctctttgtcgcgactttaaacgtatcacctggtttatactgatctttgatagcctttagtgcggttgccttaatatcatcaaggcggctgtcacacttaattgccaggctgaagctttgaatcccaaacacttgctttaaatgaggaaaaagagcctcaggatcctctccatttaatgtaatcgtcatacgatccctgttggaaaagtattttaaattcggatagtctttcaaaacgagtctgatgttttgttttaagcgctcaataaagctttttctgtttttgcctttggtcgaaatttccccaaaacgaattaatatatgatcgtaattcatgttctacctcatcatttcccttaattttttgatgccaggacgaagcgcgttcataaacggttctgccacatcgcttgtctggctgtaatttaaactgattctgatgctgcttccggcaatctgctctcctttgcccatctctaagagaaccttgctgggcttatgttcttttgccgagcaagccgatgttgtggagacgaatatatcctgttcctcaagcatgtgtaaaagcacttccgctttaatccccggtacagagaaattaataatgtgcggcgcgctattcatttgaggcgtgttgataacgacgccctcaatttcactcagcctattcataaacaattcctttacggcagtcatcgtgtcaagccgtgtgtcaaaatcagcagaggccagattaatggccttggcaagcgaaaccgcaccagcagtatgttctgttccggcccgtatgcctttttgctgagagcctcccgttatgagcggaataaggcgtgttccttcttttacaataagtgcgcctgtcccctttaggccgtgaaatttatgccccgaaattgaacatagatcaatgccggccttttcaattgccaagggcactttatagatgccctgcacataatcgacgtgaaacaaaatgttcgaatgctctttcagcacttctcctgccgcttcaatcggctgcacggaaccgacttcattgttcacatgcatcatgctgacaagcacggtatcgggacggatggctgcttttagatcttcaatagaaacaaatccgtcttcattcacagaaagataagtgatatcaaacccgaacaactctttcagctgttctaacgattccgtaacggatggatgttcaatagaagtggcaatgatatgtttgcctgtttttatctttgacaaagccgctccttttaaagccgcattattggcttctgtggcgcctgacgtaaatacaatatcatatttttttaggcctaaggaccttttgatttgatttttggctgcttgaagcagctgttccgtttcggctccatatcggtgcaaagatgaaggattgccaaagtatcggctgctcgtctgttcatatacgttcaagacttcatcgtaaggcttcgtcgttgaactattatctaaatatatcatcttttttactcctttatgaaagcggtacaaggtatgatatttatgttaccataacaaaatttaatagaaaattacgaaaaactagtattgacttctaatttttttaccatataataagatttgttcgtttcgtcatattatctgacaattaattgacagaatattttaacataattattaggaggatttttttcatgaaacactcactgcctgtcaaagataccattattattggtttcatgctatttgcgttattctttggagcaggaaatatgatttatccgccggaacttggacaagcagccggacacaacgtctggaaggccatcggcggatttttactgacaggggtaggcctgccgcttctcggcattatcgccatcgcattaaccggtaaggacgctaaaggccttgctgacaaagcgcaccctgttttcggcacaatctttactgtcgtgctttatttatcaatcggaccattattcgccatcccgagaacaggaactgtttcatatgaaattggcgctgttccgtttttgactggtgtaccagaaagactttctttattaatatttacacttatctttttcggcgttacgtactatttagcgttaaacccatctaaggttgtggatcgagtcggaaaaattctgactcccatcaaattcacaattattttaatcattgttctcaaagccatcttcacgccgatgggcggattgggcgccgtgacagaagcatataaaggaacaccggtttttaaaggatttttagaaggctataaaacaatggacgcacttgcttcaattgtatttggcgttgtcgttgtaaatgctgtaaaaagcaaaggcgttacacagtctaaagctcttgctgcagcctgcattaaagcaggtgtgattgccgctttaggcctgactttcatttatgtatcccttgcttatttaggtgcaacaagcacaaatgccattggtcctgttggtgaaggagctaaaattttatctgcgtcttcccattatttattcggttcattgggcaacatcgtactcggagcagcgattacagtcgcatgtttaacaacaagcatcggccttgtcacatcttgcggccaatatttttcaaaacttattccggcattatcatataaaattgtcgttacgattgtcacgttattcagcttgatcattgcgaatttcggactcgcgcaaattatcgcgttttctgttcctattttatcagctatctatccgcttgccattgtcattatcgttctttccttcatcgataagatctttaaagaaagacgcgaagtgtacatcgcatgcttgatcggtacaggacttttcagtattttagacggtatcaaagcagccggtttttcacttggatctttagatgtgtttctaaatgcgaatcttcctctttacagcctcggcatcggctgggtgcttccaggaatcgtcggagcggttatcggctatgtgctgaccttattcatcggaccatccaaacagcttaatgaaataagttaatgtcacagaacgcctgcgttattgcgcaggcgttttgtaataaaaaaagagcctgctcattacactgcgggctctttttcatggtcgtgattatctaagcggatatgtcagctttgattttttcaactgcacctggcgcagccttttctacagcggcagcggcaatttcataagagtcgtcataatcaaaagcataaaaacgtctttccgcttctttcagctgttcagataaaatatgattctggcttctgaaccggtttccgaactgaatgattttttcaatgaggatgacctgctcgacaagttcctctgattcccggcttgccctgttgacgatatcttctgcttgtttcaaatgggctccggcttcttccatatttaatggaagttcgtttagttgattgaccgtttcttgaatatgatgatgcgcgttctccagcatctcttgaatatggctcggaatgcctggaatgttgctagtcttcagcagtcttgctgtctcagaaattgtttttttcaaattgctgagcgtctccctcgcctgaagctcttcttttctcagcgcttgcagattttcacgatactcggcatgctcttttttcacttcttcaatttgcttctctattgaagcaacttcttctactaaaagtgagtaggcgacatgctctgcatcaagcttatctttaacggatgatagcagctttccaatttcatcaaggcgcttttcaaaagcctgctgtttgccgagctcaccggctgtcagcctgtagctttccttcaccagctcagtttccgctttcgtatgctctttctcttctttaagcttgtcgtaagcaataatcaattcaggcattttgcttagtacggattgaccggcttcaacttcgccctccagctgctgataaacagattgaatattttcgtcaatgagctgcaggattgcggacgcttcatcaatatccagttcagtcatcaggacatgttccgctcgtttcagctggtttgacagattttctaattccttatcaagctggatatgctcaagcttgtaccctttttctttcatttcgccatagccatccttgagctttgcaatctgtccgggcaccgtctgtttacagtcagctaacagcttcggcacatcatctatgtatgactgaagccgttcaagattgcggtcctgctcaagcagtacttttcgtgcagtaatatagtttccgccttctgtttcttcttcaaattgtttgatgccgctccaaatttcgtccagatccttttcaaggctgtcataaagctccccgtaaaggtggctgtaagccagcaggttttttcgagatttcgaatagcgctccctcacctgttcaatctcttcacggctcttttcctcacttgtgacaagatcgctgatttcccgaagaatcttttcaatgcttgattcagccgctgtcagcaggtcgtcgatatgaacgagcacttgattggcctttttaaaccggtatttgtctgcattttcctcggcatcataaaggagctcttcaactttcggcatgtgggctgtgacaatctcatcccattcttcacgccacttctcaaagaactcttctgtctgacccgtcatttttaaatgttttattttagacatttcttccacgatcgaccgattcagaatttcaatcttccacgattccagccggtcgatttcggcgtagatttttttcctgaaaaagtagcctgccgcaaacagcgcaagcagtacaattaataatccaatgacaaactccataatgagcccccttgctgtttaccttaatctgtcagggtgttttatttattcagaaagatttcaggatatgtattgagaaaaactgtcgttttcattgttattatgataccatgtaacaaacattttttgaccagaaatcaaaaactttttgtgcaaaatcggcaggatttgactattttttcatggggtgacatcaatgcaaaagcgagacggacatattcacacaccattttgccctcacggctccaatgacacactcagacaatatgcagaagaagccttaaaaaaagggttcgaatcgattacttttaccgaacacgccccattgccgccatcttttaccgatcccacgccgctgaaagacagcgcgatggcgcaagcttctttggaacgctatattcatgaaatttccggattaaaaaaagaatatcgcggacagcttagcatacggacagggcttgaagtcgattatatcgctgaatttgaagacgaaattacattattcctagacacatacgggccatatttagatgacagcatcttatccgttcattttttgcgcacagactcttcctatctatgccttgattatgacgagcataccttcaaagagctgatttcagcctgcggaagcattgaagcggtatatgaacaatattaccggagtatctattcttccattgtagcatctctcggcgtttataagccaaaaagagtcggtcacatcacactcgtccaaaaattcatcaagctgtttccatacagcatgtcagagcatattcgcggcctcgtttctctgtgcctgaatgccattgaagaaaacggaatggagctcgacttcaatacttccggcttaagaaaaacttacgctggcggtatttatatcgaggattggatgctgaatgaagcgaagcaaaagaagatcccgcttgtgtttgggtctgatgcccatcaagcgggagatgtcggatatgcgtatgaggcgtttttggaacggtgctagttggtgagcgccacgtctcctgtccggaagacgcttctgatccaaatcttgatttcttcaaaatacattttataaaaatacggctcgtgcggctgcatgtagagtacttctgaaatatattgaggctggagatagggcatcatcaagagagattttaattggagaataaaatgaggcagcggcagcgttaaatattcacgctgtttttctccttcctcaatgatcagctggaagatatacttttccttcattagatatgtcgacataatttccctgattaatgtggagtcaattgtgacttcccggtagacaaaacgagttaattgacgatgattatgctgataggataaaatatcgaaaaccaattgaagaagctgttcctgcgtgctttgagtagagatattgcttgccgctgtttcaagcgttttgctgtagccttcgtaaaactctgaaactaagtgttccatcaagcctcctttgcctttaaaatagtaggagatgtgcgcaacatttacatcagctgactttgcgatttcacggacagacgtgccagaaaatcctttttggttaaaaagcatgacagcagattcaataattttgtctttggtgcttactttcatacggctcactccttcctcttgatactattcaagcagaaagccgctgttcctgtaagaacttatcgacaaatgccggcagaaaagccggaactttgttttatattatagaaaaagtgagggttttccatgttccatgtcgaaaaacaatctggagataaagaaaaagactatcagcttctgctaaaacagctcgaagccatgaccgaagacgaaacagaccaaatagctaactatgcaaatgcctcagcactgctgtatcattcgctgcctgaagtcaactgggcgggtttctattttgccaaagaagaggatggacagcttgtgttaggtccgttccaaggcctgccggcatgtgttcggattcctttcggcagaggggtttgcggcacagcgtacgcaaacggaaaagtggaacgtattgaggatgtaaacgcgtttccgggacatatcgcctgcgatgcagcgtctcaatcagaaattgtgcttccgattcgtgtagacggaaaaattgtcggcgtcttggacatcgacagcccagtgaaaaaccgtttcgacgaaattgatgaaaaatacttaactcaatttgccgaaacgctagaaaaagcgttagcgcagtaatataaaagcccaaaactgatatcgttttgggctttttttattttattgagtcatgaatcatcaagcggtttttcccgctccgtttcgcgctgtagagcgcttcatctgcctcatgcacaagctctttcagcgacttttttgtttctgtcgtccagcaggagataccgcaggaaatggttacctcgggtttcgtattttttctgaccgcgtaaaccagtcgctcggtaatccgtttccccactgcaaccggcacatttggcaaataaatcgccagctcctctcctccccagcgggcaccgacatcatgctttcggatgttgcttttaatcactgaagcgacttgaattaaaatctcgtccccagtctgatggccgtacgtatcatttacatttttaaaattatcaatatcaacaagaataaaaacacccttttgatggattttcatgctgtattgaattttttcatctaaatacgctcgtgaatacagttcagtcagctgatctgttttcacgagatgctcaaggcggtcgcgaagcattgaattggttacagccagtgtcgcgtgatgaatcagcgcctgaaacagcttgtacatttcaaatgtaaaagcgtacagctcctgtttcaataaaaccgcaaagcctaaaagccggtcgttttgaatcatcggagcagccatcagcgagccgtaccccgccttcccaaaaacagactggccattcccgatgaaaacccctttttcaccttcatacagcttttctttcagctcattataaaaatctgacggcttcgcttctttaaaaaatgctgtgctgcctgggagcaatgttaggttttcaaaatggtctatatgaaaaaatcccacttcttctgcctgaaacgattctgccattctcacagccagatcattcattgtatcagtcaatgtcagccgctgattcaggcgtcgtgatgtttcattaatcaattccaaatttgcgatgcttgctttggattgttcgtagagctgggcattttcaaacgcttttcccgcggcgtttgctaacagcgacatttcatcaaggcaggcatcagtaagaaagctgtcacccgttccttcagccttcaacaccccgtatgtgccctgctgtcctttgatcggaatataggcgacagattcatttttccgcaaaatgtctccggacaaatacactttgagcgcaaaggaatcggatttttccccttccatatacagctcttttgcaggaatccctaaacattggtcttgatcgtgcgatataaataaagaaaactcaaaaagagaaaatgtgcttgtcaagctttctaaaagctgcttcagcacatctgtctgatcaagcagtgaatggaacagctctgtcattttgtatatctttttttggtagatcgttttgttatagagtctttcctgtttcatcgactggtttaaaaatgaagcaaccacgtccggaagcccttcaggaatctcttcatcctgcctgcacgcaagatggaaacgcctgccggagccgtcctcaatcagataacatgaagcgtttatttttgaagcggaaaaacgcgcttcaccatctgccagttttgtcacaaagtctgatggtgacggtgtaagcgaaacacaaagggttgaaaaataggtttgaatagccgaagtcagccatatgaaagagtcggtgaatgtgactttttcagatttggttaataaaaaatcgagcatatgataatgaaaggcggataattgatctttagtttgttctaccatgtttttatcacctaaaagtttaccactaatttttgtttattatatcataaacggtgaagcaataatggaggaatggttgacttcaaaacaaataaattatataatgacctttgtgtgaaatattgcagcctttttgttcagcttctatgttttcattttgttccttatcaataaggtgtatcgtgtaactctctgctgctggagcgaggatacatgaaaacaaaatgtgcatggtcgaatagagcagacggtttttattttccacaaaaataaaaccaaaggaggagtcacattatggctcgctatacaggtccatcttggaaactgtcccgccgtctaggaatctctcttagcggtacaggaaaagaattagaaaaacgcccttacgctccaggtccacacggcccaggacaacgtaaaaaattatcagaatacggtttgcaattgcaagaaaagcaaaagcttcgtcacatgtacggtgtaaacgaacgtcaattccgcactttgtttgacaaagctggcaaactagctggtaaacacggtgaaaacttcatgattcttttagattctcgtcttgataacgttgtgtacaagctaggtttagcacgtactcgccgtcaagctcgccaattggttaaccacggtcacattcttgtagacggaagccgcgttgacatcccgtcttacctagtgaaacctggtcaaacaatcggtgttcgcgaaaaatcaagaaacctttctatcatcaaagaatctgttgaagtgaacaacttcgttcctgaataccttactttcgacgctgaaaagcttgaaggtactttcactcgtcttcctgagcgttctgaacttgctccggaaattaacgaagcgcttatcgttgagttctactctcgttaatcgttttaaaaacccctgccgctatgcggtcggggtttttttatcggctttcgcctcttgctggccaacactatcttgcgcctgctgctcccaatgatcccgctgcagccgttcttttgcaatcgtacacatgagattcacgctttagcgctcctttcatttaaaaggtggtgattggtcgtgtttgccctatctaatatactcttttcctttcattcctatgcggtaaacaaaaagatcctttgccttcagtggcaaaggatctttttcttatttatacgtcacaaggaagtattttttcttcccgcggcgcagaacagtaaattggttttcgatgcggtcttcacctgatagggtataatttatttccgtctggcgttcaccgttaatgtaaacagctccgttttggatgtcttcacgcgcttggcgtttagaaggagataatttagattgcaccaacacatctacaagtgaaagctcttgggtgctgtcaacttccatagaaggaacatctttaaagcctacttttacgtcttgagcagaaagctctttaatattgccgctgaacagcgcttgggagatgttgatggcttgctccagcgcctcgcgtccgtgaacaagtgatgtcacttcttctgccaggcgtttttgcgcttcacgtttttctggcgccgtttctgttttttcagcgtatgcttcaatttcctcttttgaaaggaacgtgaagtatttcaagtatttgacaacgtcacggtcgtctgtgttgatccagaattgatagaattcatatggcgatgttttttctttatcaagccagatcgcgccgccttccgtttttccgaacttcgtgccgtctgcttttgtgacaagcggaatcgttaggccaaacgcttttgctccttcttcttctgattttctgatcagttcaagacccgctgtgatgttgccccactgatcgcttccgccgatttgcagtttacagtttttgtctctgtaaagatttaagaaatcataagattgaagaatcatgtagctgaattccgtgtacgagatgccggattcaattcttgagctgaccgtatcttttgccagcatgtaattgatgccgaaatttttaccaacgtcacgaaggaaatcgatcacattcattttgccgatccagtcaaagttgttcgcgatgacagctgggttttctgctgcttcaaaatctagaaatctggacagctggtttttgattttttgggaccattcggatacgatgtcagcagtgtttaatgtacgctctgctttttttccgcttggatcaccgatgaggcccgtcgcgccgcccacaagcgcaatcggatgatgccctgcaagctgaaaacggcgaagtgttaaaataggcagcaggtgtccgatatgcaagctgtctgctgtagggtcaaagcctgagtacaagcggattttttcttcattcagctgtttatttaacccttcttcatctgtcatttgctgaatcaatccgcggaaggataagtcttcaagtaagttagtcataagataaagctccttttttaattaaaataaaaaacgccccttcgtttacacgaagggacgattgattatcgcggtaccaccctactaataagagaatgcaaacattcgtcttatcactttgcctgataacggatcaggtccgttctttcactactgaaagcctggccggctttgtttgcaaaagcggttcatgagtgtattcgatatatccgtctgtgctgattttcaccggccatcagctctctggaacgtaaggatattctacttgtctcaatctttaccttttcatatgaagctatatcatttttaacataaataaaatcctgtgtcaacgccgccttttaatcctccattgttgacagatctccagccggcagattaagctcccatgccttcagcacgcgcctcatgatctttccgcttctggttttcggaagcttatctttaaattcgatctcacgcggagccgcatgggctgcaagaccctgctttacaaataggcggatctcttctttcagtttatcagacggctcaaatccttccctgagtgcaataaaggctttaatgatttctccacgcaccgggtcaggctttccgataacgcctgcttctgcaatagccggatgttcgacaagcttgctttccacttcaaatgggccgacgcgctcaccggaggtcatgatgacgtcatcaactctgccttggaaccaaaagtatccctcttcatccatgtaagcagaatccccagacacataccagccgcccggcatgaaatacgattcatacttttcagggttattccaaatggtatgcatcatggaaggccagccctttttgatggcgagattgcccattcggtacggcggtagctcgttgccttgattgtcaacgatcgctgcctccactcctggaatcggcttacccattgaacccggtttaatatccatgcaaggatagttgcagatgagctgactgcccgtttcggtcatccaccaggtatcatggattcgtttgttaaaaactttatgtccccatctgatgacttccggatttagcggctcaccgacactgagcacatgccggagtgaagttagatcatatttcgcagccatttcatctcccgctcccatcagcatccgaaaagctgtcggcgcgctgtaccagacattgacgccaagctgttcaatcgttccataccagctttccgggctgaaacgtccgccgacgatgacatttgtcgctccgttcagccacggtgcaaaaatgccgtataccgtacctgtcacccagcctggatcagccgtgcaccaataaatgtcttcttcctttaaatcaaggacccactttcctgtttgatattgctgaatcatcgcttcatggacatgcaacacgccctttggcgtaccagtggaacctgatgtatagtgaagcagaaagccgtcttttttatccatccattcgatatccaatcttgtgctttcctgtttcgctgcttcatcataattgatgatattcgtgccgctctcagcctctcccccgactacgaagacatgctgcaagtgaggcagtttgtctaccggtattctctccagcagctcaggcgttgtgacaacaacctttgcctcactgttttcaagccggtctttcaccgctccctccataaatgcttcgaacagcggcccggcgatggcgccaattttgattgcgccaagcataataaaataaagctcgggtgatctcggcataaaaataaaaacgcggtcccctttttccacatttccataccgtctcagcacattcccggctctgtttgattcttccttcatttctttaaatgtgtatttttcatccctttttgcgtctttataataaagcgctactttgttttttcgaaacgattcggcatggcggtcaatcgcttcatacgccgcattcagtttccctgtctcatgccaagagaaatgtttctctgcctcggcccaatcaaaatgccggtacgtttcttcatagttttttaagttatgatccccctctattgctggtaacgctttcaagttcatgcccaaacatccccctttgctgaagttgtcacaattattatagtatatattcatattcttctcaatttttaaaatataaaccatgttgaaaacgctttataatttggtattcttaaagaaggcatgtatttttgataagaattgatgggacggtgaattagtggaacatcataaaacataccattcagcaaacatcaaaacagcaaccggctctttactgatagaagggcctgtctctccagaggatttggcaggttatgagtttcataaagatttaaccgcatttcgcccgcctcgcgagcagcatgaagcgctagtcgacattgcaggccttcccgaagggcgcattattattgccagagacggccgaaccattgtcggctatgtcacgtatttatatcctgacccgctcgaaagatggtctgaaggaaatatggaggatttgattgagctcggagccatcgaagtagcgccggactatcggggatgcgctgtcggaaagacgctcctgaccgtcagcatgatggatgaacaaatggaaaactacattgtgatgacgacagaatattactggcattgggatttaaaagggatgaaaaaagatgtgtgggaatacagaaagatcatggaaaagatgatgaatgcaggcggattggtctggtttgcaacggatgagccggagatcagctcccaccctgcaaactgtctgatggcccgcattggaaaaaacgtcagccaagaatcaattgagcaatttgacaggctccgtttttatcatcgttatatgtattaactgacactgacaaaggggaaaaaataatgattgttgagcaaatcatgaaaagagatgtcattacattaacgaagacggatacgcttgaaacagcaatatgcaaactgaaggaattccatatcaggcatctgcctgttgtagatgaagaacgacacgtgatcggcatgattacagacagggacatgaaacaggccagcccgagtatttttgaagaaaacaaacgaagcctatttctcacacgaagcgtagattcaattatgaaaaaggatgttgtctgcgcccacccgttagattttgtcgaagaaatatcagccgtgttctacgagcatggcatcggctgcctaccagtggtacaccatcaaaaattaataggcattttaacaaaaaccgatttgctgcggacgtttgtcaaattgacaggcgctgaccagccgggctcgcaaattgagataaaagtaaacgacatcaccaaaagcctcgctgagatcagcagtctttgccaagaccttcaagtgaaaatattaagcgtgcttgtttatccgcatgacgatcccggtgtaaaagtgcttgtcttccgtgtaaaaacgatgaatccgctgccgtttttgcaggcattacaaagaaatggacaccacgtcgtatggccgtcagagcaaagggatctgctatgagagacagtgtatttatctattctccatcctaccaaacctatatgtttcatcaggagcatccctttaatcagcagcgggttctgttaacatatgatttgcttaagacgatcaatgcctttgatgatggagacattgtcacccccagactcgcttcagaagaggagctttcccttgtccacacggacgattacattcaggccgtaaagcttgcgggcgccggaaagctccccgctgaagaaggagaaagctacgggctcggcactgaagacacacccgtctttgccggcatgcacgaagcggcatcactcttggtcggcggcactttaacggccgcagactgggtcatgtcaggacaagccctgcatgcggcaaaccttggcggagggcttcatcacggctttcgcgggagagcatcaggattctgcatatacaacgacagcgctgtggctattcaatatatccagaaaaaatatagcgccagagtgctttatattgatacggacgcccaccacggggacggtgtgcaatttacattttacgataatcctgacgtatgcacgctgtccattcatgaaacaggaaggtatttattccctggaaccggtcagatccaagaaaaaggaagcggaaaaggatatggctattcctttaatattccgcttgacgcttttacagaggatgattcttttcttgaggcttaccggacagcagcttcagaagtcgccgcgtatttcgagcccgatgtcattatcagccaaaacggcgccgatgcccattactacgacccgctgacgcatttatcagcaacaatcaatatatacgaagaaatcccccgtcttgcacacactttggctcatcaatattgcggagggaaatggattgcagtcggaggcggcggatatgatatttggcgtgtcgtgccccgcgcctgggccagaatatggcttgaaatgaagggaattgacccgggtcacgagatcccgccggaatggattgttaaatggcaaaaacaatgccccgtggcccttccgtcgagctggagcgatccggctgatttatatcctccgattccccgcaagcctgaaattacagaaaaaaatgcccaaactgtcagcaaagcattatatgcgatacgttctgaacagcaaagaacaaagtaaaaaacgacctttacgaagaggtcgtttttgattttttaatcactatttccacacgccgattttccttcatgtgttcatttgtcttgttatcctttactggctttgtatccgcataaccgacagcaataaagcgcttggagggaagcttctctttagacgtgaagtattgaatcactccacttgcccgtgctgctgatagctcccagttcgacgggtatcggtatgtcgaaatgtttcggctgtctgtatgtccctcaacctgaatgtcatttggaattgtttgaagaagaacggcaatttggtgaagaagtgtttcggcatttttcagcacctttgcctcacctgtatcaaacagcacagcctcctgaagaacgagcacgacaccgcgttcatcccgtttggctgtcatttgggccttcaaatgattgtcttttatatatgtatttactttcttgagaagctgatcctgctgatcctcttgcttcttcgtatcagatggggatgtattctttttttctatggatgtttggtccggctgaagcccgttgccttccttctggatcgagtccactgccgctttgaatttttgcagatcgatttgggacatcgaaaagagtaaaataaagaacacaaggatcaaggtgatcagatctgtaaaggttaccatccagctggatgaagattgactgttttttccgcttccattccttctttcaaaacgttctcttctaagcttcatgtacagatcccttttttgtttttacttgttttggctgcttctgccattcttcccgtgagctgaaaacgaccagctggctttcaaggttgcgcgggttttttccggattgaacaccgataatcccttccaccattacctgcttgatgaaaatttcactttctgttttctcttcaagcttagccgcgatcgggttgaagaccatatttgccagtaatgaaccatataaagtcgtcagaagcgcaatggccatgtttggtccgagcatatgcgggtcgtttaagtttttgagcatcagcacaagcccgacgagtgttccgatcattccccatgccggagcgaattctcccgctttttcaaaaactcgccgcccttttcggtgccgttcctccattgctgcgatttctgaatccatgacgagccgaatcgtttcttcatcccagccgtcaatcgctaaaagcagcccttttttcaagaatggatctttgatttcccgagcctgatcatccaatgataaaagcccgtgttttcgcgcgtgatcggaaagggaaacaaaggttttcacaagatctttcacattgtcttcctggcggatgaatgcctgctttaacacagagggcgcttttttcagctcacttggcggaaaactgataaaaacagcggcgcaaagtccccctgttacgatgaagaaagaggtcagatcaagaaaagagcggaaaccgcttactcccgatcctgaaataatcccgataacaataataatcgttcctaacacaaatccaacaggtgtaagataatcaaaacgtttcatcatttctccccatgaaaaaagcaagaattcaccataaaggtgaagcttgctctttgtttttcttatgacttggttgactttctaagctctatacggtgcggcagttcgacgatatgctcttcaaccggctctttattcatgagcttcgtcagcagtctcatcgcaacggcgccgatatcatatgtcggctgaacaactgttgaaagctgaggacgaaccatgaggcttaatcttgtattatcaaaaccgataatgtcgagatcctccggaatggataagccctgatcctgagcggcatggataatgccgagtgccatttcatcagttgcagaaagaatggctgtcggttttttatccaggctcatcagatgctgcagtgcttcgagtccggaatcatatgtgtaatccccttcagctacaaattgttcattaaacggaaggttcgcttcttcaagcgcacgtttgtagccttggagttttttcgaacggttgatcggttctgccattggtccggaaacgaacgcgatgtctgtatgtcctttatcaaccaaaagcttcacggcatcataaatcgcctgttcgtaatcgatagcgactgacggtgtttcctcctgctcttctacagaagcggcaagtacaatcggcactggagaacgcttaaattccgccacatgctcgtccgtaatgtttccgcccataaacacgatgccgtccacttgtttgccgagcattgtgtttaacaagtgcagctctttctccatgttttggtcagagttgctcaaaataatattgtatttatacattgtcgcgatatcttcaattccgcgcgcaagctctgaatagaaaatgcttgagatatcgggaatgatgacacctacagttgttgtttttttacttgccagccctcttgccaccgcgtttggacggtaaccgagacgttcaatggcttccaagacttttttcctcgttgtcggttttacattcgggttgccgttcacgacacgggaaacggttgccatgcttacattagcttctctcgctacatcgtagatcgtaatattgctcatcctaaaaccactccttttactggatacacttatccttatctatagcataaacactttatgtagagaaatgtcataatgtccgaatttatgtcgtttatgatttgtaagcgtaagtcagtagtgtacattatttttcattattcatcaaatttaattacttctcatgaaattatacacgtttttatagatgatgaaaacgtatacttggtttttataactaaataaacgagaaagcataaaaaaaggccgcaggcgcggccttttggattgttcaattaagcgttgactttcaccattggcttcagttcattcagccatttttcgaattcaggaatcgccatttgctgagcagagtcagaaagtgcgactgacggatcagggtgaacctcagccattacgccatcagcaccgatcgctaaagcggctttagctgtcggaagcaagaggtcacggcggcctgttgaatgcgtaacatcaacaaagactggcaaatgcgtttcttgtttcaaaatcggcacagctgaaatatccagcgtgtttctcgttgctgtttcatatgttctgattccgcgctcacaaaggataatttggtcatttccttgtgacatgatgtattcagcagcattgatgaattcagagatcgttgcagcaagaccgcgcttcagaagcactggctttttcacggcgccggccgctttcagcaattcgaagttttgcatgttgcgcgctccgatttgaatgacatcaatgtagtccagcgcttcttcgatatgagccggagttacgatttcactgataaccgccagatcaaattcatccgctacacgttttaaaatttgaaggccttcaacaccaagcccttggaaatcgtatgggctcgtacgaggcttaaaggctccaccgcgcaaaattttaatcccttgttttttcgcagctgcagcgacttcagctacctgctcatagctctctaccgcacatgggccgacaatgaatctttgctggccgtctccgattttttcgcctttgatatcaacaattgtatcttcaggttttttcttgcgggagacaagcagcgctttgctgtgatcttcttcctgaagctctaaaccggctttgaatatctctttaaaaatgtgctggatggttgaattttcgaacggcccgtcattgttttcaatgatattgtttaacattgtgcgttctctgacagggtcaaatcggttgacaccctgtgcttccttcgctttaccgatctcttttacaacattgccgcgttcgttgattaattttaaaatttgtaggtttaattcgtctgctttctgccttaaaagctctaactctgtgttgctcatttttttcatcctttccctgcacattcattttttattttgtagttatcatgcatcttactataagtaattccaaatggaaatactgaaatacaaaaaattttataaaaactctactttattacccaaacgcttttaagtgataaagtaatctatgaagctatcctacatgatgtgagggcaatgttcaagggttttttacaaaaaaaagcgccagatgatatctggacgcttttttctatgacaaatgctgctcaatagcggcttctgtaatttgtgaatgtgaggtatgccatttcacttcaccgttctggatgatgaatatctgagggctttcatgcttgaccccatatgtttctgcaatgaaattggacagcggccgggcttcttgtacttgaagatagtaagccggcacatcctcatgctgatttgcaaaggcatcaaactcatgaaatgctgcctggctgatcgggcatgtggtgctgtgtttcaagaagacgaaaacgccttcctgttctgcaatccgtttaaattcttcctcagattgaataagctgtttagccatgactcaagctcttccttccctgctcagcgattcaactgctcagcctgtttttgtgcatctttcagttcgtcttttacatcttctttcgtctggaggacttgatcttttgtttcatcagctgcctgcatcgcttcttccctcatatcttgcattgcagtcgatgaatccgttttgtcagatttggaacggtctctcaaatcctttaccttgttcatgatctgtccagactgatccgctacaagctgtgtgatgttggaagttttgtcttttgcgatgctgacatattgcgtgcctttttccttcgcatctgccgtcattttatcagttttgtcccgtaaggcaacagcctggctgccgagatcgtcgcgaagttctttgcctgatttaggcgctagaaaaagagctgtagtggcaccgatgattcccccgattaaagttccgattaaaaaatctttactattaattccatctttgctcatcattattcctcctcttagtatttttttctcttacagggctgattttttcttttgcttccatttctcccaaatttccattgctgcttgactccaagtgacaacttgattgatcttatcttgattctctctaactgatgccgatacagaccctgccgcttgtttcatggatgtattgaactgctgtacagaagctcccactccttgaacagcatgaacgaccgtgttcagcttttctgatttttcctgaatatcttcagccaggcggttggtcttatgtaaaagctcggctgtttcagttgtgatgcccttcatttgtccctccagcccttcaagagtggatgcgacgttttttagtgtcagctgcagtgacttcaatgttttagacaagtagatcactaatacgagaaatgcaactgcgatgagtgcaacgctcaaataaagaataataatcatctcaaacctccttgctgcaggatatactgctgtttacccgttttcttcaatcataaacatgtgtactgggctgtatacatactattctccgttatgtaagaaaatcctttaataagctttcccatcagataaataaaaagcagtgagatcactgctttttattatgccatgacgttttcgtaggctctcatatatttttggatatctcctgctcccatgaagatgagaacggctttatcatgagcttttaaaacagatgtgtcatcttcttcaatcagcttggcattatgaatttttccctggagatcaccgatcgtcagctttccggcattctcacgggctgagccgaaaatatcgcataaatacacacagtcggcgccgctcaggctttctgcaaattcgtcaaggaactgctgcgtccgggtaaatgtatgaggctggaataccgcgacaatttcccgatcaggatacttctgtcttgccgcctcgattgtcacttttatttctgtcggatgatgggcatagtcatcaatcagcacttgatccccaagctgcttctcattgaatctgcgtttgacgcccccaaaggatttgagagcatgcttaatgatgctggaatcaatttcttcataatggcataacgcaatgaccgccaatgagtttaatacattgtggtggccgtacgcaggaatataaaacgtatcatagaacgtattgcggacaaagacatcaaaagttgtcccttccgtgctttttacgatgtttctggcttgaaaatcattttcttcccccgtgccataatacacaaccgggacgttcgcatggattttcggcagatgctcatcgtctccgcaggcaataatgcctttgttgacttgaagagccatctcttggaaagcgtcaaatacatcgtcaatgcttgagaagtaatcagggtgatcaaaatcaatattcgtcataatcgcataatctggctgatagcttaagaaatggcggcggtattcgcacgcttcaaacacaaagtattcgctgttttcatttccctggcctgttccgtctccgattaagaaagacgtcggttttgcgttttggatcacgtgagccagcagacccgtagtcgacgttttgccgtgtgcgcccgtaacggcaacactcgtgaattttttcatgtagtcgcctaaaaacttatgataacgtatcaccggaattccctcagacatcgctttttctatttcaggatgcgtgtctgggaatgcgtttccggcgatgactgtcatgccgggtttaatattttccgcgctaaaaggaagaatcgtaatatttcttttttcaagcgctgtttgcgtaaaaataaatttttcgatatccgatccttggacagtatatccattatcatgaagtatttgggcaagcggactcataccggtcccttttattccaacaaaatgataaacagtcataattgtacctccaacaaacgtctatctgttccccagtatatgacgctcatttcaatttgcgaccgcggcggctgaaaagcctcccttagcggcgtattttatatgttttgttatgtttagtatcaggttatttctttccgattaaacccagatatcaagatttgtctatgcacagctgctgtaaagcggcatagctgttaaatgctctaaacactatcataccatgtttggtgtgaaaatgaacccatattattcgtttattaaatcacttgctgtgatcagcacctctcgaggcttgcttccttttgcctcagagatcatgccttccgcttccatcatgtcgatcagccttgccgcacgattgtaaccgattctgaatcttctttgcaggcttgaagtgctcgcactgttttgctctacaacaaactcacacgcttcgtaaaacagttcgtcctcttctttcagggcagatccttgtcttacgagctcttcttgttcaaataaataggtcggcggcatttggcttctgacgtgggaaacgacgcggtcgatttcccggtctgacacaaagttaccttgcagacgaaccggttttcccgagccgttttccaaaaagagcatatccccttttccgagaagcttttctgcaccggctatatcaataattgttcgggaatcaacctggcttgagacagaaaaggcgattctcgttgggatattcgccttaatcagacctgtaatgacatcgactgacggacgctgagttgcgacgagaagatggataccgcacgctctggctttttgggcgatccgcgcaatgctttcttccacatcgtttggagccaccatcatcaaatctgcaagctcatcaataatgacaactaaatacggcagcttttcacccatttggtgttcagcggttaattgattaaagcggtcaatgtcgcggacacctgaatgggcaaaaagctcatagcggcgctccatttcctcaacgacccatttcaaagcagccgtagccgctttagcatcagtaatgaccgggctgacgaggtgaggaattttattgtaaggggccagctctaccattttcggatcaatcagcagcacctttacctcactcgggtcagctttataaagcaggcttactaatattgtattgatgcatacgctttttccggagcctgtagcgccggcaatcaagccatgcggcattttcttcaagtcgataacaacaggatttcccgaaatatctaatcccagcgcagctgtgagcggtgacttgcttgtcctgaaagctgagctgcgaatcatttggcgcaaatcaaccaccttgctcgtgcggttcggcacttcaattccgatcgtgtttttccccggaatcggcgcttcaatccgaatatctttagctgagagactgagtttaatatcatcggacaagttggtgattttattcacctttacacccggttcaggatgcacttcaaatctcgtgacagacggaccctgggttacatggaccacattggcgcggacattgaaatttttcaaggtcaaatcaagaagctgacgctgttcttcgatccacgcagtatcatcttgaacctgcgctggcgggacatcaagcagtgcaacattcggaaatacatagctgccgcggcgctcctctgctttttgctgtttatgcgtatctcttttcagcatcatcacattaaaaggaacggatggccctttttgagaagatgcgctttgttcagtccttttctcctgtacaccaggcctttttttcggctcttctgaagcttcgcgaggtttgtctgcgcgaatttcctgccggttttcaagagttgcagtagacgatttggaaccctgctccatgtgttcagttttctcaagctctgtatggctgtctggctgaacatctatcttcgtttcctgagcctctcccagggtgtcataatgattatttattatgctttctgatggctcttctgattcttttgccacagtttctgcttgagccagagcctctgatgaatactcatgatcagtaaataaaggctcttcctgacgaatgtccatttgttcttcttgaacgaacggggactcagcaccttctgccgcgttttcatgatgattgtatactgggctgtctgacggctcttttgctttttcatcctcagatactgcctctgtctgagattcaggagctgtttgctcttcatcaagttcagcggagaaaacaggctcttcaaatttctctggctgctgctccctttgttcttcctcagccgttgcaggctcttcgcggcctacttcactgtctgaaagcccttcagccgccgtatctgtgagcatctcaggcggtgtttgctcttcggcttgttcagctgggaagaaaggctcctctttttccggctgttgaacgcctgactcaaatggcactttgttacctgacggctcggctggccgtttcgccagcgcctcatcatgctccgtatcctttctgtttaaaacgccagaaggctgtttttcaaattgggtatccgggaagaaaggactttctattttggaatgcgcctgtgtgtctgaagcaggatagccgcgttcacgttcgatctcttctgacagcagtgttaccttctcttttaccgatttatccggttcgttcaatgtttcagaaggctttttcggcacatcctttttaacagatggtttttgattgaatccatagacaggcgaagggatatttgtcggtttaaacggtttcttcgccggctctgctgcttgatatgtatgctgctcttcttcatttctgggacgctctctgtaaggtgcagcacttggacgaggcgcggatttcggttcgtccgatggtgtgcggcgccttctcaggtcatgatttttgtatccgtcaggcacgactggaaaacggaatttgccttttggatattcataatatattttaggatcttccaatctttttaattgtccttcaggatgatgtacttcttgttgctgcggaatttgagcgggttttgtctcccgttcagcatcctcttcgctttcgcctaaaaacaaatcaaaaaatttatgaagccaactcataatttatctctaactcccttatagttttctgggacggtttttagtataccactgctggtcggcccagaaaagattaagctatcagcagaaacaaagccgctaaacaagggcttagcggcttttcacatgattcgttttttttggcggatttatgggagtctaaaactgaaatgcgtctcccgcctcatagtctccttctaacacaaggattcctttttcagcaggggcatccggcaaatcaagctctttcgctgagcagatcatcccgcttgacggaacgccacgaagctctgcatccttaatgacaagtccgctaggcatcacagcaccgactttggcaacgacaactttttggccttggtcaacgttaggcgcgccgcagacgatctgaagcgtttcttctcctacgttgactttacatacgcttaatttatccgcattcggatgtttttcttttgattctacataacccacaacaaacttcggagataaatcaacgactaatgtttcttcaacgccgtttctgtttaaaatctcattcacatcttgcacgaatgtttctgagagcgcaacagggccgttttcatcaatggtcaagtaagaagacgcattgaaaatgttgaagcccgttgtttcttttgtttcgttattgaaaattttgacgacgtcgccgtgtttttcatagcctaattgttcgcgtgtcacatcttgaagagagatcaggagcgtgtctcccacaccttctttattataaaaagcgttcataagtaaaaatcctttctaatcctttttcggacggcttttcgccaggataaacaccggttccagctttccttcattgtacaaaaatgatagggcggtaatcgggacggtgccgcctgcaaagaagctcatcgacatttgtcctagaatatcataccccgattcattccggatgtcagcaagaatcaaaacgtcctgatgaggaacagagatcgccagctcaccttctgcatgctgcttatactcatttaagatcgcttcgttcaaaatccggcttgcgtcgtatccgtcgtttgccctgaagaaataaaagtaattgccggcaaccgtatcctctttgacaaccgtcggcagggaacggagattaaatgcggccgtctctctgatccgctcttttgtccagttttctttctcaagcatgcgctggtcaattaaacggtaggttttcccgagatctagcgcgtaataaattcttgtctctgcggtatgatcgtcataaatgagcgggatatcttcgctggacttgtccgggaaggaagtcgagcggatgaccggataaatgcgagtttctttcccggtcatttcctgagccttcccttccattgccgtcatcgcttcggagacatagtacacgatctcatcaatggcttcgtcttttttcagttcccattttgcaataatcggcggcaaatcgagtgtaatcccttttttagtcgtttgatcctcaacacggagggtgtctttttctctgtcaaacagaaaggagcgattctcgtgctgaaggcgctgcttcagtatatctgacagcttccttgaggtcattttcaaaccgatgtcctcctttacgctttagcgagagagtctgttaaaaactgttcaatttcttcttttgttttgcggtctttgctcacaaaacgatttacttcttttccttcattaaacaccacaaagcttgggattccgtaaatttcccactctgcacatgtatcaatgaatttgtcacggtctacgtagtagtaggtgaattcagggaaattcgcttccagttcaggcaggaaaggctctacaaaacggcaatccgggcaccaatcggccgaaaacataaatacagaccaatcatcctttaccgctttttccagctcttgagttgattcaatttttttcatttcatatccctccagttgtttatgttcttacatgttttttatcgatactcgtccatttggatcataccaaactgcttgaggcaaaaccacttatatgcaacgaatgaatatgtaagattggctttcccattatcattatcatattttatttgcattatcaagctcgtttcgtttaacatcgtgtacatgagggtgaaatttacagatggatatacataaggagggatttttattatggagtttatcgtctatttagcaggagaaatccacagcaattggcgcgaggaaattaaagaaaaaacaaaatcactgaagctcccgattacgtttgttggcccgatggagaatcatgaccgctcagacaatattggtgaagaaattatgggcgtacagccaaatgccgttttaaaggatgacaaagcctctgacatcaacaacttcagaaccgccgtcctgatgaataaagcagactttgtgatcgccctgtttggcgaaaagtacaaacagtggaacacggcaatggatgcatcatatgcgatcgcaaaaggaaaacccctgattatcatccggccggaatcgctccaccatcctttaaaagagctttccaataaagcgaatattacggttgaaaccgttaaccaagccattaaggccctttcctatctatttgaaacagaataagaaaaaagcttgtcgatccgggcttactgctcgttcaacaagcttttatgaaacctacatattttctttaatcgcatccactgtctgcttatcgcaggctgttacaagtttgatgagcatttctttagcagcagcataatcatcaatatgaatgatagtagcgtttgtatgaatatagcgggaacatattccgataaccgctgacggcacaccgctgttcgaaatatgaaccttgcctgcgtctgttcccccgccggatacaaaatattgatatggaatatcatgcgtttcagccatatcaagaacgaattccctcattccgcgatgcatgactgtcgttctgtcaagaatgcgcagcaaaaagccttttccaagctggccgaattcatttttgtctccgctcatatcgtttgccgggctggcgtcaagggcgaaaaacaagtccggtttaatcatatgagaagccgtctgcgcgccccttagccctacttcttcctgaaccgttgcacccgcatagagtgtattcggaagctctttaccgtgtaattccttcagaagttcaatgcttaagccgcatccatatctgttatcccatgcttttgataaaattttcttttcattcgccatcgtcgtaaacggacaaacaggcacgatctgctgtcccggtctaatgccgattttgatggcgtcttccttatcatccgctccaatgtcgatcatcatgtttttgatatccatcggtcggtttcgctgcgcatctgtcaataaatgcggcggtatgcttgaaatcacacccggaaccggcccgttatctgtttgaatttcaacccgctgcgcaagcaaaacttggctccaccagcctccgagcgtctggaatctgagcagcccgttgtctgtaatggatgtcaccatgaagccgacttcgtccatgtgcccggctaccataattctcggtgcgtcctctgcgcctcgtctgactccgaaaacacttcccagtctgtcctgaacgatgtcatctgcatatttggctagctcctgcttcataaaagcacgaacctgatgctcattgcccggcgcgccgggaagctgcgtcagtgtttggaaaagcgctttcgtttcttgattcatgttttcccctcatttctatgtagtccttttattttattagaaacaatgaagttttccaagcactctgacccaatctgctcgatcagccgcgtattgcttaacaggatttggctgtttctgtataatgaaaagtacgatcaaccaggaggtgctttattttgaaattgcgtcatcttcttttaggagcaggacttggaatttgtacggctgtcgttgtgagacaatatgtgatgaagccttatatttcttcagaaaaagcgcttcgaattgtaaaatctgcttttaagcagcggggcccgattgacggatcatggatttacacccagccggagccctacaatattaacggagaaacggtacaggtatacaaaaccggcattacacgatcagctttcggagaattagaacagtatgaagtcatggtggatgcgaaaacgggagaaattgttgatgtcattgatacaatcgcctcttaacaccggacaagcaaaaaatagaagccgctgcctatgcagcggctcttttttattatatcgcgcgaatcggtttgtataccggataccacatcgcatcctgcactgcctgtataatgtcttcaggctcttccgtagcgacgccttccttcattgcggtttttgcaacttcaacagcaacggttgccgaaacagtgcgcaaatcttcaacttttggaagcatcggcgccccaggcaccccgacattgaccatacctgcgattgcccgggcacatgcttcaaacatgccgtcggtaattaattttgattttgtaacaatcgttccaagaccgagaccagggaagacaagcgcgttgtttgcctgcccgatatgatacgtaactccgttatattcaactggcgggaacgggcttcctgtcgtgatcagcgcacggccttctgtccattcgattaaatcctccggctttgcttcagaaagagttgtcggatttgacattggcaaaatcgccggccgtttcacatgtgacgccatttcttttacaatttcttcagtgaaagcgccggaaaccgtagatgtgccgatcaggatcgtcggtttcgcctgccgaaccacttcaagaagatcaatgcctccgccgtctccgttccgctgataatccttcacttcatcagccgaacgggcatacggcttttggaaatcaagaagctgatccatatcatctgttaacagcccgttcctgtctatgcaccagaagcgcttgtatgattcttcttcactcagtccctcgcgcaccaatgcttcccgcagctgttcggcaattccgattcctgccgttcccgctccgaatataacaactctgtgatctctcagcggaactttagacgcttttgcacaggataagactgcggccaaagaaacagcgccagttccttggatatcatcattgaaggtacacactttatctttatagcgtttcaaaatgcttcgcgcgtttttcgccccgaaatcctcccaatgcagcaatgcattcggaaatgtttctctcgccagcgcaacgtagtcgtcaataaattggtcataacgttccccgcgcactctggaatgctggttgccgacataaagcgggtcgttcaagaggctctcctgatttgtccccgcatctaaaacaacagccagcactctgctcggatcaatgcccgcagccgctgtataaaccgccagcttgccaatagaaattgcgattcctccgacgccccagtcaccgattcctaaaattccttccgcatcagttgcaacaattaaatcgatcgtatcgctttgatctttatactgtttaaaagcttctttcataccgtccgggtcatcgattgacagatagagccctcgtggttttctgtattcatggctgtatctctgaattgccgttccgactgtcggtgtgtagacaatcgggagcatttcccctaaatggtcatttaacaggcggtaaaacagcgtttcattccgatcgtgcagcgccgttaaatagacatttttgctcaaatcgtcaggctgtgcggaatattgttcatacgctcttttcgcctgatcatcaattgttaataccttgggcggcagaaagccttttaaaccaagttcttttctttcttcctcagtaaaagcaacacctttgttcaaaaaaggaacagagagcacttcaaggcctcttaatgttgtttgaatgtctccttcgtttgttactctgaattgtttcaccctgcctcttcctttctgagcataatagtactaggtttgcattattagccggaaaacatgcagggtaaacataaaaatatgctatcgcttcattcgcttaactgactttttgatgcttccgtcctcctcccattgaagggcgcgatactcggcatcatggtaaaaaataaaccaagcatctttttctgctgcgaacgcctgccatttctgcttttgcgggatagaggtcatcggataatcatcgtaagccagcacccatagcggattgcggtgggcatgtgtcggcatcagatctgccatatgtacggcagtttcacccgcatcctcgcatatcaggacactgtgtccgtcgctatggcctccggtgtgatgcattgtaataccctctgtgatcgttaaggtgtcttcaaaggttttgacttggccagctacagcctcccaattttctttccaatacgtatttttcgacctgatattcggatggcgcatttcgtcccattcaacagctgatgtataaatcactgcattcggaaagacagagacgagccgttcaccttcatattccgttaaaccgcatgcatgatcaaaatgaaggtgtgtcattgcgatcacatctatatcggcaaccgttaatccgagtgcagctaatgagggtttcacattcgactcttgtgtcacgccatagtttcgtttttgtttatcagtcagcttgccgtacccaattccggcgtcaatgatgatattgagcccatccttttgaatcaaaatagggtctgttcttagttcaatctggtttttttcattgactggatattttttagaccaaagcggctttggcacaacgccgaacatggcgcctccgtccatatgcgtcacgcctccgtcaagccaggtcaacgtgatgtttccaattttcattgtttccattttcacccccccctatcatcatggtagcaaacggcccataaaaaaaacagactcctgtcagagtctgtctttacgttctccattcaacctcagcccgatagatcggctggccgagtgcagagaatttttcttcatattctgtcataatattgccttccagattgctgttatgcaaatcgagactgacgtatgtcagcaggaggccgtactcagagaagctcttcaaagagtactcaaataaacctcggttgtccgttttaaaatgaatcgatccgcctttgcccattacttcttcatattttttgaggaagtgggaatatgtcaggcggcgtttttcatgccgtttcttcggccaaggatcagaaaagttcaagtagacccgtttcacttcccccggctcaaacacatccgtcagcgtgtccgcatctatattcagaagctttacattctgcgcttcgctgtcttttactttttggacggctgtcacgatgacgcttttaaataactcaataccaatataattgatgtcgggattttgtttggccataccagaaataaattggccttttcctgtaccaacctcgatatggatcggattgtcgttgccaaacactgtgttccatttccctttataatcagcaggattgctgatggcaatatctgcgttttcagccaaaaagtcatcagcccaaggcttgtggcgcattctcatatgattgacacctctatctattatttcgactaacaacataccatgaattaaaaagacccgcaagctcgtttttccagtgtatctctcttaaggccgagcgcataaaaaaagagggtcccgtctgctggaacactcctttcccatgtataaaaacgctctgttttgaacaatttaacccgtatgatactgaagggatgtgtaccgttatgggtttacattatgagcatcaagttcatttattgaaggatatattgactgaccatcaattggactgctgcggaacagtcgcagagtacgagcagcttgagcgtgtgattaaatcactgatggcaaacaccgagcttgattcaaatttcaaaaacgtgcttgaagatgtttaccgctacagccaatcaggaatatcgtccaaatccatcgactcacacatacaagagcatcagaacagcctgtctcaatgggtagagcaaatggattcgtattcctgattaatcaacaattcgtttcatgaggatatgcagctcttccattgcatcatgaaattccttatcattgccttttgctttatgccaggcaatgaaagtaattgtttcagataacacataccaagccattcgcaaccgaaggctttctgtcagctctatgccgtacatgctcagccagctctcccaagctggcttttcgacgtagtggtacagcaaaggcccgaggtccatcgccggatcagcgatcatggcgccgtcccagtcaattaaatacagctggttgtcttcagacaatagccagttattatgattgacatcacaatggcaaacgactttctcaccgaaatgcacttcatgcaggtgttcttccaaatacttgatcccttcttgaatcagcggcgaagattgctgcacagcaaatacagcctgcttcagctgagacaaaagagcccccgggttcagcggttcttttccaagtctcttcagcatgtccagcaaggcttttgatgtgtgtattttacgaagcaattcagcaacgggccgtccgctcatgtctttaggcttcagctctctgccggtcatccagtgctgggccgtaatgacgtccccattttccatccgttttgtccaaaccagcttcggaacaatgccttcggcggataaaacagctaaaaaaggtgagctattacgttttaaaaaaagctgctgcccgttatgtttcgcataatatgcatctcctgtagctcctccggcggggaagatctcccaatcgctacctagtaattgtcccaaccagttcatatcaatgttcaacccatcatttcttaaaatattttagaattaaggctaatcgtttctagtctatccagcgaatgcctttttcgtacgaatcgtataaaaataaaaaagacagctattgagagtctcatatgctaatcaatagccgtcctttaaattttagcgctatagcacaaacttcgtcaagcaaaactcttaagatctgatgctaaatataagataaccgttccgatgccgtttactgcaaccgttttcttgatttctgttgggtcttcctgaaatcctgatggatcacataaaagccgataaggtatgtcgtttggcagcctccactcgacggagtctggactcgcgtgatggataacaatgatatctttccattcgtcaacctcgtcaagatcataaagcctgtatgcgataaggtgttcttttagcgtcaagcattcaagatggcgctggatgtctgcagcggacctaagacggaatgcaggatgcgcttttctcagcgagatcagcctgcggatatagtgaacatcttctttgaatgtttcacggcgatcccagtcgagctggttgatgctgtcactggattgatagctgttttccactccctgcttcgtccggaaaaattcctggccgctgtgaataaacggcaccccttgggcaagcaaaataatcgcggctgcaagcctttgcctgcttcgctttcggctgtcattttcttgaggaagcgcaaagctcattttatcccaaaaggtgtgattgtcgtgtgattcgacataattgatggactggcttggttccggaacaatcggtgctaatgccttccatccggaagacccggcaattccatgcatcacagcttgtgctgattcaccgttgccgagcgcaaaccctgttgccttaaggtgaaaggtgttcccttttacagcgtcacgaaacatatcattaaaaaagccgatgcccggcattcttggcgcgttcgccaaagcagctttctgttcatgcggcagcggtgtagccaggtcccacccttctccaaaaagcaggattccgggctttgccttagttgctttctctttcatataaagcacggtgtcaatatctaaaatcccgaggagatcaaagcggaagccgtcaacattgtattcttcaagccaatagaccacgcaatccgcaatgaattttcttgccatccttctttctgatgcaatatcattgccaacgccggtgccgtttgatggcatcccacattcgtcgtgccggaaaaaataaccgggcactgtcttttcaaagggggaattctccctcttatacacatggttaaaaacaacatccagaatgactcgcagaccgtgctgatgcagggtattgatcatttgtttcagctctgtttttctcgtttgaggatcatgaggatttgaggcatagcttccctccggggcaaagaaatgaagcgggttatatccccaattgtatgcatcaagcggcttctcttcatcaactccggcaaaatcattcaccggcagaagctccacatgtgtcacaccaagctcttttacatacgctaatcccgaagaactgccatttgcggtttgtgtatcagtttccgtcagcgctaagtattttcccttgtttatcatgccgctgttttcatggatggagaagtcgcgaagatgcgtctcatagatgacggcatccacagggtgtgagaatggtttaagaggagcagtccatttcatttgatccgggcgcaagacgacgcccttctctccatttacagtcacagccttggcatactggtcaactgtttccatccattctgaattgttgcagatgcaaaacaaatactcatatccgtgaaggtcacctgtgaccgtaacggcatagacgcctttttccaagcgagtcatttggaatgtgcgcccgcttttattggggtgtgaaagcttgacagcagctgaggttgcagcaggcgcccatactttaaatacggtatgatccgcggtataaacggcgcccagctctccgtcataataaaattcgtcatcaaacgctgccgtccggatgaccgcgccaatttggagatccgttttgtggccgctggatgctctgacgcaatggatttttccaaatgtcacaggatggtcggatacgcagacgtacttgtattttgcttcaagggagtattcctccctgacagccagaggaaaatctgttatttctgtctcaagccgaaacggcggtgtcatgatttccttttgttcagcaggaatcagaacagtaatgatattcatgtcatcgacatacgcttcgaagctgcggcggatgctgaccatcggaagctctctcctccaaacacgtttatgttttgattcttaggggtgaaggactagatgccagacgaaacggggtagtgcccatgatttctccgtcagcatggaacgggattttgtccttcgtgtaaaatgtaatgtccttcgctttaaacatcgtaacgccatccatctttgtatgttttccaaatgccatgagacataaaagccaatattttttcaaaaacggctggttttcaacgattacgatatcaaatgtcttctcgcgcggatttgctaggggcgccgccttcatgcctcccccgtaaaacggatggttggatacaacggcaaaccagacatcatgaaattcgcgcgtctcgtcttccgtcgtacaagctaatgtaaacggcttaaaggttgccgaagcgtgcaaatgagaaagcggatacacaagaaatcgaaggcggagaaaaagaaaaacccgtctcaacggaaattccatcgcctttttattgacatatgcgtcaaacccgatcccgatatgattcataaaataaagaatctgtgatttatcctgaaggaaattgacgctccctaaatgaaaggttcttgttaacgggcgctttaccttcttgatttcctgtatcagatcgatttttttaatagagaaccctcgcgaaaaatcattatacgcgcccgccggcacaaagctcagctcaatatcgtcaacatctttcagcccgttgacaacttcatgcatggttccgtctccgccaatgacgatcaggcgcttcagcttatattcctgtatcgttgaaatctgtctggcgagcacctcggcgtgtcccggatgttcagttaaaaatgaacggtgctcaacctttcgtttgatcaattctttttgaatggacttccaaacacgcaggccgtttcgatgtcctgctgtcggattaataataaaaaaccaatggctcatctttctcacctgcttatgttatgagaaaaccgctcaaatcgttctcttttactccagccactcctgtctgcgataggagtcagacatgcagtaagacaatagagcctttgcagcctttacctgatgatgtttgatcggagcagtgtttttcttctgccgctcaatccattcttccgcgctccgcttatccgctatttctaagccgtatggcggctccgggtaatcgatgtacgacgttctgctcagaagcaattttcgaaccggaatctcagcctgtttttcctttacgatctttgacacaaccgagtccgtacgaaacaggctaagccctggatttaacactgatgcagtctgagaggctgttttcttgtcccaaaaacgatttttagaccctatgtagacactgtcttcctcagcctctaaaaaagaaacgcaataaatttccagaggagaaataatcacaatgcttaattcaaccgccgcctgctgaattttcagcacaggcttatacataataaaataagaatcaggcagctgctgggtcagataacgcaaaatgcggtcctgcttcacttggtttgagagttgagatatttctgaaagagtagagcttgcccatttgagctgaaaatcatataaatgccttttataaaaagaagcaagcgccaccctgctcttcgggagccttacatgaatatcttcttcgtcctcaaaccattggtgtctctcttcttgtatatcggcttttatctcttcttttcttcttttcaatgaaaatttttttcgtttctgcaccggttccggttcttcagcactggcttgcctttcttcatgctggcgctccgctgcttctactagtgaaagccagcgctcttttttcaaacgtacaaactggttgatataatggtacggatcaagctcatatctcgatatataatcatgaattttgatgatttgtgccatgtttgtttctccactccgcaatgaattaagataattgaaatttgaatatttcctcgtattttggtgattggttcaagtgtatttgaaagagcgaaaatcgttcagccatcatcgaaacctcgccgctttcaaacggaacatgagctggaaatccatcttcgcctgtccattttcttgccagcgtcatatgaggatgatacggtcttttttccacttgaaagccggcctgaagtacagcctgcttcgtatgttcccgcagtctatcaagcgttttgtttttctttggctccagatgtaaaacgcgcggctttctgcggtcgccgaatacatctatcttgccaaacttaattgaaaatggatcaatttctgaagcaatctctgctagcgaaccttcaagcttctttatttgtgtctcatccgccgctccgagaaaaattaacgtgatatgatagtcaagcgggtgcacccatttttgaaacgtcaatatcggttcgtttttcgcagcctggtagatcggatttgcaattccctcaggtatgggaacgccgatgaaataatgaggccgtatatctggcatccgtctgacactcccttctttgacagctattattttatcaataaagaggctgtgcggatagaggaacagtgtatgaaaacactctcgcacaaacgtttattatgttaggatattatatgacacttgttttattcagaaaggaatgacaatgttgaaaatcgttgcaaacacagctgatctgataggagatacaccgctagtgagattgaatcggcttcagccggaaaatgcggcacaagtctatttaaagcttgaatttttcaatccgagcggcagtgtgaaagacagagccgcttatcaaatgatcatagaagctgaacaaaacggtttactcaagccgggatcagttattatagagccgacaagcggaaataccggcatcgggctcgccatgaatgcggcagcacgcggatataaagcaatcttagttatgcctgatacgatgacgaaggaacggatcaacctacttaaagcttacggtgcagaggttgtattaactcccggagaggaaagaatgccgggcagcatcaaaaaagcgaaggagcttgccgaacaaattccgaacagctatattccaatgcagttcgataacactgctaatcctgatgcgcaccgaaaaacaacagcgcctgaaatcgcccgggcaatagaggaaatcggaaaaccgctcggcgcttttgtagcctcctctggaacgggcggaaccattaccggaacaggtgaggcgctcaaagagctttttccggatatcacggttcatgttgttgagccagcgggttcgcctgtattatccggcggaaaacctggcgcgcataaacttgtaggaacgagcccaggctttataccgccgattttaaatgaagacgtttatgatgaaattatcaaaatctctgatgaagacgcgtatacgacgacaagacggcttgctgctgaagaaggaattcttgtcggtccttcatcaggcgctgcctgcttcgcggcaatcgaaacagcgaaacgcctctctcctgacaaagttgtggtctgcatgacagctgatacaggagaacggtacttatcaactgatttatggtcatttatttaaaaaaaggactggcttcagcagaagccggtccttttattttgcaagctcgtaaatggcctgagcatataacgctgtcgatctcagcaggtcatcaatttcgatatattcatccttttggtgtgcgctgtcagggcgtccggggaacagcgggccgaacgcgacaccggcttttaaggatctcgcataagtccccccgccgattgagattaaatcagcttttttacccagctggccttcataaaccttttgcagggttttgactaacggatgatctgcggacacgtgatgcggcttgctgtctttgaattctcccagctcaaattcagatgcgctttcgaatgtatcgcggatcactttgctttctgctgtcacaggatagcggatattgatcccgagctcgcctccttgcccttctttatagcgcagtgttccgacatttaatgtcagctctccgctgatttcatcctcacagtcgatgtccagtttttttcctcttgtatcacctgagaacttatctgtcacaacttgcacaaaccgctttcctgcatcgtcaagctcagtctgctggagaaattcgcacaataaaatgccggcattgatcccattgttcggttccatcgcatggcaggaaagaccgtacatacgcaaaatgagctgtccgttctctattgcagcttcccctttttggtccgtcgtgcggagcatgtctttaaatgaagacagaatctcttcatttttcggcccttcaatgacagcttccgcagcgtcgggcaccatgtttaagcgaaggcctgattgaaacgagacaagcactgcctttggttcagcttgatttgggcggtgcggaataagtaaagaagcatcgatgatccctttttccgcattaatgatcggaaaatcggcgtcaggcgcaaagcccattgttggcatttcttcatgcttgaaataatgctctacgcatctccaatcactttcttcatctgttccgataatcattctgactcgcttggacaggggcaaattcatgtctttcacgattttcagcgcgtagaatgccgccattgtcgggcctttgtcatcaatggcgccccttgcataaatccgtccgttgcggatttcagctgaaaatggatcactcgtccacccatctcccggcggcacgacgtcaacatggcaaagtacgccgataatgtcatcgccctccccccattcaatatgacctgcgaagccgtcaagattttttgttgtaaagccttctttttctccaagctccagcaatgaagtcaggctggcatttaccccttctccaaacggtttaccgggtccggcggttgtttcgtccatgacactgttgattctcaaaaattcctgtgtatcacgaattaaatcctctttttttctgatcacttcaacttcccagttcataatgatcccctttccgcaagaaatgacttgcaaaaaccaaataaaacgaataatattaatggtgttttgttaaaacgttcgtaattggaggatactatgtttcatctaaaagagcagcaaacatccataaagcaagaaatcatagcagggctgacgacctttttcacaatggtctatatcgtcgtggtcaatccggtcattctggctaacgccggggttcctttcgaccaggttttcaccgcaacgattattgcctccattgtcggaacgctgtggatggccctggcagcaaattatccgattgctattgcgcccggcatgggcttgaacgcttatttagcctttcatgtcgtaagcgcaagcgatggcggcatcacgtacgcaacagctttcagcgcagtatttacagcaggggttctcttcattattctatcgttaacgcctttaagaaaacaacttatagaagcgattccaaacaatttaaaatacgggatcacaacagggatcgggctgtttattgcttttatcggtttgcgtcaagcgggaattgtggcagctgatgagtcaaacctggtcactctcggcaatctgcattcacctggtgttatcttaacgctggtcggccttttgatcagcgtggtcctgatggtgctgaatgtaagcggcgctttatttatcggaatggcagctaccgctttgatcgcctttttcaccggtcagctccatttttcaaagggatttatgtcgcttcctcatttgccggaaggattgatgatctcaaatccatttaccgcttttggcgatgtcattcatcacggcctgtacgctgtcgtcttttcttttctattagtcaccatttttgatacgacaggcacgatgatcggagttgccgagcaagccgggctgatgaaaaacaacaagctgccgaacgtgcgaaaagcgctgcttgctgattcaaccgcgacgacagtaggagctgttttcggcacaagtccgacgactgcatttatcgagtcttccgccggtgtcgcagccgggggaagaacggggcttacggctttgactgtcgcggtgatgtttgcggcttcaatgtttttcagtccgcttgtcagcgccttgtcaggtatagccgccatcacctcgcctgctttgattatcgtcggcagcctgatgatgggctcagtttccaatatgaactggaaagagatggacgaggcatttcctgcgtttctcgtcattctagccatgcctttgacctcgagcatttctacaggaatcgcgcttggctttatttcgtacccaattgtaaaagcggcgcggggaaaatggagagagattcatccgctcgtcatcgttttcgccattctgtttttcatccagctgtttattttataaggatagaccaaaaaacccaaacgtcgccgtttgggttttttatgtaaacaataaagagacagcggccgctaaaaaacaacaggcggcaaacgcatagtgcaggatgttgatacagctttttctggcccgataatattcatcactttccttatcggtgccaattaaaaaaggggcatccatgaccttgtcaaaaataagcgtcaggatataacggcaaacccctgtgtataccagcagcgcaatcaccttcagccaaattggggaaacaaatatgagaacagtgaaagctgacagtagcatgtacatctgccttgcatactcgccattcctcagcataactttaaaaaacaactccttatagcctgtgcagatcgttcgtcttttaaatatcctttttgaatttcggtataataatggttttcttctcatcctgtcttttacttttggcattcccgcctcctgactcatcatcatcacaagtcctgcaagggcaagcctgctttttttctcttcagtcacctcagcttcaaaagccgtgaacgaggctgtctttttcaaactgcggataactgagaaaaacaaaaataaaatgccaaaaagcgcaagcaagtgccgctcagtaaaaacaatcaggatagcagaaccagcaaaaagaatagctctgacaagggtatcgccaatccatctcgaaatggagcgcggctttctgatcctgtcttgctttaaggataaaaagaatatatgaaggccaaacaaataacacaatagagcagtgctttctgcgaatgtgatgagaacagaatgactgatcaagggaaggacaatgaaaaagagaagcagccatttagccagcgtggccagaaaagaatacaaaagcgcataccgtttgagctgatagatgatttccttcttttgcagcaaaaacactttgtccgcttccattaaaaatgtacgaatcgaacctgtaaacatgatcagcacacacacagcatacagccatctccattccgccacttcagaccactcataaagaaggcctcttccgttcatcaaatcaatatactgatagatgacaaaagcaatcgccggcaaaacgatatagagagcgactgtccagtcaatgaccgcatgcaacactttaaactgatacttataatagtcaaacagccttcgaaaaaagagcgtacgcccgttcatagccgatcaccttgaactgccttataaaaacagtcaagcaatgactgcccctctaatccggtcttgtcctgaacatcttttaacgtgccttggagaaataatgaacctttctcaatcatataaaaccggtcacagattttttccgcggtatcgagtacatgcgtgcacataagaattccggctccacgttctttttcagccttaagcatgtccacaaagcgtttcgtcgatatcggatcaaggccgataaacggttcatcaatcacatacatatccggcttagagagaaaggcctggataagcattagtttttgctgcatgcccttcgaaaaggtgacaggcagctcatgtttgacatgatctagcgaaaacgtctgcagcaggctttgggcccgatgcgcaaattcactctcttcaatgccgtgaagtgtgctgatcagatccaaatgctcccacagcgtcagttcttcgtagaaggacggatgctccggaatatatgcaaatgaacagtcgttccaggcaatatgccctttaaaatcttctgaaaggccgagtatcgccttgattgcggtgctttttcctgcgccgttagctccgatcagtccaaccagttccccttttctgacttccagaaaaacatcggtgagcactttttttcggcttgtatacccggcctgttctattgaagcttcaagcaaatttgtcaaaactcactcacctccaaaatttactacgaaatagaataaaaaaagtttctttaaccataataatattgagccgaaatacatagtaatccaacaaggatggctgcccaacgcgaaattggaaaaaattaataggagttatccctagattcatcactgcaatatcgtgtataatgagggcgaattattttaacaattacagatgtctgcctttgttgctatttcgtacgcagttgatagtcgtgagttgtggttagtcaagtccatccgatcttatgatagggagtggttttttgaaaccttcaacaaaccgtatgctaactcgaatcaaatcagtttacatgtttattcaagaaaaaggtcttgtgacaacacaggaactggttgacgaattcggcattacacctagaacgattcaaagagacttaaatgtgttggcatataatgatcttgttcatagtccaagccgtggcaagtgggagacaacgagaaagaaagtaaagattacctcataaattgaaaattacatagggccgcctgagagcggtccgatagataacagggcgaagaaactactgagccttgtttttgtgtgcttataaataaaaccccgcattcggtatgcggggtttttgtcatgcttgcggctcatttagcaaatgaagctcttcctctgtcagctcacggtattctccgggtgccagagcgggatctagggaaacgcgtcccatcgaaagccgcttcagataaaccacttcattgccgactgcctttgccatttgcttgacctgatggtattttccttctgtaattgtcagatatataacggtattgccactgtcgtttgttttgatttccgcttttgccggctttgttttatagccgccctctatgtagacacccgtttccaaatcggaaatgtcttcccgagaaatctgtgattttaaatggacttcatacgtttttggaacatgctttttaggagaaaggagccgatgtgcgagctggccgtcatttgtgagcagcaaaaagccctctgtatctttatcaagcctgccggctggaaatggctcaaatctcatctcctccggcgtcagcagatcgaccactgtttgctgccggctgtcctcagtcgccgacagcacgccctgcggtttattcatcataagataaatgaactctcgataatcaaccggttccccgtatacggtcacctcctgcgtatcaggatcaacgtgctcctttacatctttggcaggtttgccgtcgatcatcacggctccagccttcacaacggctttgacttcttttctggaaccatacccgctgttggcaagcagcttatcaagtctcattcccaatctctcctttataaaagaaagcccgcagcatgcgagccctcagtttcatcatatctagttcatcagcctgcatgtctgcctttcctaaagaaacctggcaaacggcggcctaaaattttctgcaaaaatcctaatcggtagccgcaatacaggtagacagctccgccaacagcggccgcgatcaccacaacaatcgcagcttgcatctggccatcctgataggaaataaagaagcctaatacccactgcacgattttcacggcaatacccataatggctgataagaccagcatcaaaacagttcgtttaacaagtatcttatacgaatagcctgcatggcgcttaatcatgataaacccatataaaagggaagcgatatatccaagcgccgtcgctaaaatcgctccgtcagcctgcatcagcttgatcagcggaacattcagcacaagcttgatcacgacaccgatcacaaggctgacaaccgcaaatttttgcttattgatgccctgcagaatagctgcgttgactgtaaacaaagagaacagaattgcgacaggcgaataccaaagcaaaatgtttgcccccagttcaggatgaaggctctctgacccgtaaaagaacgtatacgtcggtcctgacaatagagagatcccgacaacagccggaataattaaaaacaggatcgtctgcatcgtttgattaatctgctgatttaacagcttatagtttccgcttgtaaacgattcagtaatcgttggaattaatgtcagtccaaaagcagttgctagggaaaccgggatcatcacgagcttctgaacatacagggttagaatcgcaagcatgtcctggctgatggcttgatgaccggcttcaatcatcgctttgttaaacgtatttgtatcaatatagttatacaaagggatggctagtccgacaaaaacgtacggagcagcatagctgaacagctcgaaaaacattttcttgtagcttaggtttgctgtcggacccgtattcggcatcatcgccagcaggctgcccttccgtttgttccaataaatataaagcacgaccagccctccgaaggcaccgatcagcgctgcgaaggttgcatagcccacagcgatgacaaggccgccgttgaaaaccttcaaaatcaagaatgtcgcactcaatagaaagatgatgcggacaatctgttcaacgacttgggaaacagctgtcggacccatcatttggtgcccttgaaagaatccgcggacaaggctcataatcggtacgaccaaaagcgctaagctgaccatgcggatgacataaacgacatgatcaattgtcaggccgttattatccttgcctcccagcgatatttccgcaaacatcggagccgatagatacagaatgaaaaaggctatcattcctgtgactagcataaccgacatgcccgccttgagcattttcctgcttgtctcataatccccttttgaattatatttggaaacaaatttagaaacagcggccggaaagcccatcgtagcaatattcaaaaataaagtgtattggttgtatccgtattgaaataatgcaccgcctgtcgccccgaccataatgctgaagggaattaaatagaccatccccagaatccgcgatatatatgtaccgagcgttaatacaaacgtgcctcttaacagtttgcttgacatgtttcttcatcaccattttctacgaagattcaacttttctattttaccacaactgggcatttagacggtaataaatacaaaagcaatcctgtgaacattcatgtccgcggcaaaagacgtttaaggagcggctttctttcgctataatagtactgcggacgggtgtccgcacacgaaatgaaaagaaagttgatgataaagatgaaacaatatgacgtaatcgtaatcggcggaggcccttcaggcttgatggctgcgattgcagcaggagaacagggcgctggcgtgttgctgatagataaaggaaataaattaggacggaaactcgcgatttccgggggcggccgctgcaatgtgacgaaccgccttcctgtggaagaaattatcaagcacatccccggcaacgggcgttttttatacagcgcgttttctgaatttaataatgaggacattatcaagttttttgaaaacctcggcattcaattgaaggaagaggatcacggccggatgtttcctgtgaccgacaaagcccaaagtgtcgttgacgcgctgttaaacaggctaaagcagctccgcgtaacaatcagaacgaacgagaaaattaaatctgttttatatgaagatggacaggcagcagggattgtgacgaataatggcgaaatgatccatagccaggcagtcattattgctgtcggcggtaaaagcgtgcctcataccggaagcacgggagacggctatgaatgggctgaagccgcgggccataccataacagagctgtttccgacagaggttcccgtcacttctggcgaaccgttcattaagcaaaaaacacttcagggcttatcactaagagatgtagccgtcagtgtgttaaataaaaaaggcaaaccgattatcacacataaaatggacatgctgtttacccatttcggcctctcaggacctgccattctcagatgcagccaatttgtcgtaaaagagctgaaaaaacagcctcaagtgccgatcagaatcgacttgtatccggatatcaatgaagaaacgcttttccaaaagatgtataaagaactgaaggaagcaccgaaaaaaaccattaaaaacgtgctgaagccttggatgcaggagcgctatctcctattcctgctcgaaaaaaacggcatctctccgaacgtatcgttttctgagctgccgaaggatcctttcagacaatttgtaagggactgcaagcagtttactgtcctcgcaaatggcacactgtcgcttgataaggcatttgtcacgggaggcggggtatctgtaaaagaaattgacccgaaaaagatggcttctaaaaaaatggaggggctttatttttgcggtgaaattctggatatccacggctacacaggcggatacaatattacctccgcccttgtcacaggcaggcttgcagggctaaatgccgggcaatacgcccgttcttaatcattactctttaaatctcttgccgccaaactcacatttgaacattccccgcattcatgttagggtgagacttgttttgtttcacctgattgcggggtaattttaagagaggaatgagctgccatcgtacgaccatactaagcctgcgagcaagatataggcgtacacaaaaaattagagggtgagaaatgttgaaacatatatctagtgtattttggattgtgattgcaatcacagctgcagctgtattatggggtgttatttctcctgacagcctgcaaaatgtgtctcaatcggcacaagcatttattaccgattcatttggttggtattatcttttagttgtctctttgtttgtcgggttttgtctctttttgattttcagcccgatcggaaaaatcaaactcggaaagcctgatgaaaaaccggaattcgggttattatcatggtttgccatgctgttcagcgcaggcatgggaatcggcttagtattctacggtgcggctgaaccgatcagccattacgcaattagctctccatcaggtgaaacagaaaccccccaagccttcagagatgcactccgctatacgtttttccactggggtttgcacgcttgggccatttatgccattgtggcattatgcattgcctatttccaattccgcaaaggcgcacccgggttaatcagcagcacactgtcaccgattctcggggataaagtaaacggaccgatcggaaaggccattgactgtattgcagttttcgccactgttgtcggggtgtcaacaagtcttggtcttggcgcaacccaaattaacggcggtttgaattacctgttcggcattccgaatgcgtttatcgtccaattggttttaatcattattgtgacagtgctctttttactttctgcgtggagcggactcggaaaaggaattaagtatttaagcaacacaaacatggtattggccggattgttaatgttgtttatgctcgttgtcgggcctacagtgctgataatgaactcatttacagattctatcggacaatacattcaaaatatcgttcaaatgagcttcagactgacaccgaacgatcctgaaaaacgcgaatggattaacagctggacgattttctattgggcatggtggatttcctggtctccatttgtcggcattttcatcgcccgtgtatccagaggccggacgatccgcgaatttttaatcggcgtcttggtgacaccttgtattttgacatttctatggttctccattttcggcgtatcagccatggatctccagcaaaaaggcgcgttcaatgtagcaaagctgtccactgaaacgatgctgttcggaacacttgatcactatccgctgacaatggtgacatcgatccttgcattgattctgatcgcagtattctttatcacgtcagctgattcagctacattcgtgctgggcatgcagacgtcgtacggttctttaaatccggcgaattctgtgaaactcagctggggtatcattcagtccgccatggcggctgtgctcctatattccggagggcttgccgctttgcagaacacagcgattctggcagcgctgccgttttctatcgttatcctgctgatgattgcctctctctatcaatcgctctcaaaagaaagaagagagatcaaaaaagcggagaaactcgataaaccaagaagtccaagagtgaaaaaagcatattaacaaaaaagatctttccgcgcctgcggaaagatctttttatttgcgatataaaataagggcggaaaaacagtaaagctgctcgccgtctgggtcgcacgccgccgaaaccgtatatttgatatctatcagctgctcctccgatatcccttttaaaaatgaattgatttccgtttgtaagtctttttcatgctcttcatcaaataccgctaccttcagcattttatccgctctcctttctctatcaatctattccgtttggaacagcgttatgatagagaaatgatgattatctcgtttccggataaaaagctttccgtatatgggatttcctctgtggctcgccgccgtgctgctccactttcagcagcacggcataaacaatgcgcatatggcagtagctgataaggctgacgctgaaaaaagggacaatgcccggcaggtacgcaagcaagaaaaagagagcaacagtcagcgcaagcatagtaagcgtatattgcaaatacgccacactgagcaagagcgaaaatttcacatacagacgttttttccagtcaaaatggacaagcagcggaaacacataaaaaagcatggatacgaacaaaaagccaaatatcataatggcgaagcgcaggatgtgcagaaggaaatgacttggataaattaaggccaaatcaatataaatgatcactccgatgagcgccagtacagcgccgagcagatttgaacgaaaaaattcacccttgtattcctgccaaaacgttttgagcaccggaacgttgtcctgcccctggatccacttccgcatgacagcgaataaagccgcggtcgcgggcatgatgccaaacacgccgagaccgagcaacgtaaaaaacagccacagcaagtttgtatacgcaaatctcataatccattcgcaaaaacgcagcatccgtcccagtgagccatcatgttccatggcgccccctccttttttgcattatacattctgcatctgaaaaagctctttcatgccgatcggcttcttttcggcaaccgagcgccacattccctcaccaaccgcgatggagtaggctccagcttcagccccggctaaaatatcatagcggcgcagcgggtctttccctaaaaaaagatcctcaagcaaaagcggatcacctccgccatgccccccttcatttttgaccacttgtatcgtctgctttgattcaaaaagcggatagtattcgattgtctgctcaggaaaagcaaacggaattctggaaggttcgtgaaattcatttgattcaatacgtccttttgtgccgttgatcgtcagccggtagccttcatacggggccgaaaaaataatcgagtagcttaacagtgcgccgccatcatatttgactgccgccacgtacgtatcctcgatgtcaatttcctcgtcaaaaatacacgcgtcaggcctgtatgcagtatataagctggactggtctcctgcttcaagatgatcatcctttatagaagctttagaggaacggggatgccaccttgaatagtagtggcatttttctttaacacggcacgtcccgcaaaaacgcccgtcttcttccggcaaggggttccactcactgtccggcccatagtaattcaaggcgccataagcaaatacctcttccggattttgcccgagccaccaattgacgagatcgaagtgatgtgttgatttatggacagaaagaccgccggaaaactgtctcgacctgttccagcgtttaaaatagctggcgccatgatacgtatcaatataccaatttaaatcaacagaagtgaccctgcctatttttccgtccagaatcatttcttttattttccgatgaaacgggctgtagcgatagttaaacgcgacggtgacttttccttcgcttttggcctccgcttcaagcacccgattcgcatcctgcactgttgtcaccattggtttttcagtaatcacatctgtattccactgaaggctttttacaatatatgcgacatgcgtatcgtccctgcctgccacaatgacgatatcaggctttgagacgcgcatcatctcgtcaaaagcatcttcgctaaactcaggcacgtgggccagctcgggaaatttcttcttgcaaacggcaaaacgtttcggatcggcatccagcaatcccgtaatctcataatgagttgaaaaccgctccatcagtggtttgataaacatactgaatgctctgctgctcaatccgcaaaagacgatgttcttcaatatcctcacctctatcgggcttcagttagttgagaaatcagctgcagcgcttcctctgttttttcagcatacacagggataaacgccgccatatcgcgattcaattgaaaagaatagccgttcagctgttttttccctttttcgatctgaacggcatagatcgttttttctcctgtttttttattaacagttgtataaggagatgttttttcaggaggcaatccgtttaacggctgaaaattttccggatcatcgtaagcttgaaacatgtcttcaggcacgatgaaaacatctccctcatgggcggtaatttcagtcagcagtttttcctgaaaagctggaaagatatcgaccttcccggcattctgctcggcggccttttttattttttcctgtacgccagcctgcatatcagaaaagagaatgacatgcattccgtccggcctgcttgagcatgatgccaaaaagagcactgagacgatcacacacaaagccgtacgtatcctttttgtcatttccccgctgacctaaaaagaggctccagctctgtcatagctaaaataaacgcgccggctccgtgcagatcgtttgtgcttctttcgcggctgacataatagtcatagaaaccggctgacgttccgacacatatgtctttgacgagaaacgctccgtcttctgatgtttcggttttatgctgaatcaagccttgatacgcttttagcagtgttgtttcgtaagctctgtctagatagcctttattgattccttttgcgattgcgtacatgtacagacaggatcctgagctttccagccagttatcagacctgtctcccttatcaacgatctggtaccataaccccgtctctttgtcttgatagcgacagatgcttttaatcatgtcctgcagcgtgtttttccacacatgacggttcggatgcttcttcggcagctcttcaatcatgtcagcaagagacatgacgtaccagccgatggaacgtgcccaaaattccggtgaacagcctgtctcttcattggcccaaggcatttttttcgcttcatcccaggcgtgataaaaaagtccggtttttgcatccttcgtatgctttctcatcaatgactcctgaagcacaacctgatcaaacagctccgtctcctgcttcagattggcatatttcagtgcaaacggcccccccatgtataagccgtcaagccacatttggtaaggataaccgtctttgtgccaaaaaccgccctcagacgtccggttcagtgttccatataagctgcgcagcctttttgccgctttgacataccgttcatccttcgtctgctcgtataatggaaaaagaatgagacctgcttgaatggcgtccagttcatctcttctaaataatagattgccattatcatcgattaagagatctgcataagccttcgcatactcaaaataccgcttttccccggttgcttcccacagccgcaatacaccgcataagaaaacaccctgatggtagtgccagcggtttgcaggtggcagctcctcgactgtgtacgtgttcataatggtgtttgccaatgcctccgcgtacgtaagaggcgattttacagcgattgattgatccattgatcccatccctttcctaataaattccttcctcgccaaatttcttcgccaaacgattcgctagcatgaccaaaatcagcccgaccgccgctttaaatacgccgactgctgtactgtagctgaattggccctgtttcagccctgcagtataaacatacgtatcaaaaatttccgccacttccctgttagtcgcatttaacagcaaatacacatgctcgaagccaagctccagcgtgtctccgattttcaaaatcagcaaaacgacgataacgcttttaatggcgggcagcgtaatatgccacatttgccgcagccgtcccgctccgtccattttcgccgcttcatacagctgggggtcaaccgctgtaatggccgccagataaatgatcgtcgaccagcccgcttccctccagataacctgcagaatatacaggggccggaaccattcttcgttcagcagaaaattgattttttcaccgccaaaaaacacaatcagttcattaatcaagcctccgtctaccgttaaaagcacaaacgaaagcgatacaacaatgacccaagacataaaatgcgggatataaatcagcgtctgaacaaattttttaaagagagcaatccgcacttcgttcaatagaagcgccagcagtatcggcaccgggaaaaatatggccaggttcaaagcaaataacacgagcgtgttttttaacaagagaaaaaatgtaggctcagtaaacagcctgataaaatgcttcagccccacccactcactgcccaaaatgccgaggaacggctgataatcctgaaacgcaatcacaattccccacatcgggacatacttaaaaagcaaaaaataaatacaccccggcaaaatcatcaagtacaaatatttttgttgaatcagcttgattagtaagcgctttcttttttcttttttaaaaatgactgcatcaacagccggcgcttgcgcttctgctgttttcattttttcctagcctcctttcacggattcttgcattcactgtagcgcagcaggcaaaagtccgtctacaatcatatgatcacatcctgttttatccctttataatcaagggttcagccggtccacctgaaaaaaagacaccgatattagaaaatgattattgacaatatctatcaatctttggattaattgtattaaggtgaagtggatgttatgaaatggggggttttatgaaaagaagccaatacaagttttactacaaactgatcacgtttttctgcctgctcagcaccattccggttattttggtcggattattttcgtacgagcactctcagaaaacggctatttccaacgtttcggaggaaaaattcgacacactccagcagacccagcaaagcatcgagcatatattgaaaaccgtcgatcactctttaacccactatgtgagttcgccgcctctccttcgcacattgtccgagcctttgcactcagaccaatttcaaatctataaccaagtgaaccaagagctcaattatctgcaaagctttgataccgatctgtccaacatgacgttagtcagttatacgaaaaaatggtacatgaacaattccggtttgtaccgtttgaatacagacactcttcatgaagcagcctcagcgtacacgaaacaaaaagcgagccgctcctattggacgcttgaggaaaacaatcatttgatttcaaccaaagaaggcacagcagaaaactgccgctacaatatcaatttaattaagcagcttcctttgaacagcacaaatacaaagggattggccgccgcaagcatcccgagctgttcgcttgtcaaaaatatgcccggctattcaaacgccaacaacctgtttatcatcgatgaaaaaggcctcatcatccttcataacaatatgtctgacgttggtgaatctcttcataacgacggctttgtccaaaaagtgctggcgcaaacggccaatagcggacagtttgaaacagtgattgaccggattcattataaagtcacctatcaaaaatctgactataatgcatggacttatttttctctcgtttccctgcctgagttaaaaaaagaagccaaatcaatcggctggatcacttttgcagtatgcctcattttgttaacgctttcattgctgttctcttggcttggctcccgccatttttacaagccgatcagggtgctttacgaatcattcgcaagacatggagccatacaagagaaacaacagcctcctcaaaatgaatttgagttaattgaacagagctttaagcagctgaaggacagaaatgacgaccttgaagaaacgatgaagcagcaggccactcatctgcagcaatattttatggtcaggcttatgcttggaaaactgacggatgaggaggttgataaccgttttgaaagcctcggcttaaagcaaaattggcggcaccttgccctgcttgtgctccaaattgacacactgaatcatacgccttatgagaaaaaagatatggatctgcttttgtttgccgtcaacagcctgattgagcgcaacatcccgacggacaaacatcttgcccccgccgtagttgacaaacagcaggcgacgattttgatcaatcaaagcgggacaaaggaagaattcatggctgagctgaatgagactgcaaggatgattcaggaaaaagcggaagctgagctgcagctgtctgtcagcatcggcatcagccagccgtttgatgtgctgacaaaagcgaaaacagcctatgcggaaggctcagaagcgttgaaatatcggctgaaagcggaaaacaagtcgatcatcttttacgaagaccttgaccagaaaaaaaccttcaaaacccattttccaaagcagcttcagcatgagctgttcgatgctgtcaaagcaggagacaaggagaaagcggataaatgcctgcacgcgattttacaagccattttcacccagaacaccaacccgtatcaatttcaaatcgccatcgcccgttttttgaaccatgtgattgagctgatgcatgtgcttgggatcgaattgtttgagcttgaagaaaacaaaatgctgtatgaccaaatttttgagctgaaaacgttcgaggataccgaaaactggctaaagaatgagtttattgatccgatgacagacaaagtgaacgcccgcgcggatgcccagtacaaaaatatttccgacaacatcattcatatcatccatcatgagtttgaatccgaattgacactggacgaaatcgcacgcaggctgcattacaacccaaattatttaagcagtattttcaaaaaagaaatgggaatttcattcagcgagtatgtctcaagctaccgacaccatatggcgaaaagctggcttgccgaaaccgacatggcggtcaaggacattgccgaaaagctgaaatataaaaactcccaaaacttcatcagatcatttaagaagctggaagggattacaccgggaaactaccgccagcaaaaaagaagcatgtaaaaaacccaaaaccgcttgcgcgttttgggtttttccaatgttattttgcttgtttaaacgcttcttcgtattcctgaataatttgttttcctccgcttgactcccatttttccacttctttatcgaactggctttctgtgatgtctccaatcatatatttgtaggtcgcgtcatcaatgattttcttcagttcgtcaccccgttccgactccgatgcggaatacaggctttcagccgggtttgagacgataatcttttcattgtcctcggtcagctcctcgtacgccgtccgaagcggatctccagtgttttttaagtaggctttatcaatggcaattaaagcggacagcggctgaatatcagtctgccagtcttttacctggctttctttgcgtgtaaacgttttgtcctcacctttgttgtaatgaacgccgtcaatgccataagtcatcaggctatagacatcttcttcggcaattcggtcaaaaaacgccaagatccgtttaagctcagcttccgttttcacactcgttttcgggaaagcaaacacgccgttatggcctcctgatgcccatacccgctctttcccatctgggccttttatgcggttgatgatctcgagcttcatcgatttatcagaggcatggtcgcgcagattgaccgcatctaccatattgccaatataaattccggcttttccttgagaaaacagctcttgctgctgggttttgcttgtgacgggaaaatccttattcatatacccgttatcacgcagctttttcatatagttcatcgtgtctttgtattcctgtgtcatgaaatcaggcgtgaatttgccgcccgattccttccaatctgtcggcatgccttcatacgagccaatcgttttaaacgcgccgtaaatcaagtcattacggtctgccagcccgaatgtatcatctttcccatccttgtccgggtcgtcctccgtaaatgctttggccacttcataaagctcatccaacgttttcggggttttcaaatttaaattgtccagccagtccttccgaatgacgatcccctgtctggaaagcgggcgctctctgtatatcccgtagagcttgccgtcaattgtcacatttttattaatgagtttgttcattttgtttaagttgggataatccttgatataatcgccgatttcccaaaacattcctgaccgaaaggcattcatgactgacgaatttttaatatcctggatggtcacgatttgcggaagattgccggctgcaagcgctgcattcagcctgtcttctttcaccgcgtctggaacccaggtgatgtcgagttctgtatttgtcagcttttcaatttctttaatcgccctgtctttcggcggctgctggtgatacaaaatcgccatccaagacagctttacctttgaatctgggccagctttgccttcagccgaagactgatcagttcctttacagcccgccagcactccgccgagtgccagtacaagcacaatcaaaagcaccctccatttgtttcccatcgtacccctccgtttcatatttctttatcctttgacagatcccagcaaagctccttttgcaaaatgcttttgtataaacggatagacaagcagaacagggatggtcgccaccactatgaccgccattttaatggtttgctcaggcggcgggctgcccgaccccatttcagacatatccccctgcataccgcttgatacaatgacgatttggcgcagaagcacctgaattggccattttgctgaatcatttaagtacaagatcgctgtcatatacgtgttccaatacgtgaccgcataaaatagtgaaatcgttgcgatcgcaggaagagacagcggcagcacaattttaaagaatatgcccagatcattgcacccgtcaattttcgcggactcttccaggcttgacgggatattttgaaagaagtttttcagaatgatcaggttaaaggcattaatggctgtcggcaaaataagcgcccagtaagaatcgagcaatccaagcgatttgaccacaaggaaagtcggaatcatgccgccgctaaacagcatcgtaaatacgacgagaaacatgagcggctgccggccgattaaatcacggcgggataacccgtaagccatcagtgacgaaagaaacatgctgaccgcagtgcctatcactgtcacaaacacagaaacaagcaaactcttataaataatatctgttgaaaaaatgtagcgataagcatctagcgaaaaagtggtcggtattaaaataaattttttcgacacgacttcttctactgtggcaaaggatgctgcgataacatgaatgaacggaagtacgcatattaaagcgaacatcagcaagaaaccataaatcaacatatcaaacagacggtttttcagtgaatgtgcgatagctcccacctccctttgtaagcgttatcatatttttggaaaccgagctcagcatgtgacgatatcgtgtctaaaatgtagcaaatctgtgattgccatgtctataatcatttgaacagtgtccccggccgggcgggggctgccgcgaattgagaccgataacaaaagaaaaagagcataatcttagaaaatgattatgctccgttctcctcctcgttcagaagttcagccgtattgatttgtggcgaaaacccaagttcattcacggcagattcaatggaccatggccggcccggattatcagagacggcgtaataagtgccataccggatgttggtctcaatggcggctttgaaaatcgacagcagatcggggtgagaaagcagtgtctttttcgtccgttctttttcatgcagcgtatccatttcatctgtcacgactgttccgattcgaaggttgattactgatagcttattttccaaataaaacaaatggccgatctgttcagaggtcagctttaatacaccgtacaagttttttgacagcggataatcgcttgttgtgatttcccgtcctaagagcgagcgcccgtctttttcatatacatctgtgacatgattgctgctggcgaacacgagcttttgaatgccgagctccgctgccgcacggcacagataatagcttgccctatagaaaacatccgtcattttttcaaactcagcgatgtccataatatcgtatttgattttcacagcgagtaaattcaagatggcatcggtatcttttggaatcttcttcaacagctcctcataatttgccgcgtcagcctgaatggaagaggctttgccatcgaaatgatctttatcaagcacagtcacttcatagtctgaaataagcccttcagcaagcagtctcccaatcacaccatttccgccggcgatcagcacttttttcacgatgttcactccccttttttatagattgcccattttcggcggggctgacacttttttggcactcacattcttaggcttattcaaaagtcaccggcagctcctcaagcgcccgaaatccaaaaagcggccgataccgccattcaaaatccgcaagattaaggctgggcattcgctgcagaagagtgttaatcgcaatttgcgcttctaatcgtgccagcgaggaccctaagcaaacatgatggccatgcccgaatgaaagatgcggattaggacttctcgtaatatcgaagacatcggggttcgtgaatatgctagggtctcgattagccgctcctaacaaaagatagacttgttctccttgacggatcgtcaccccgcagatgtcaatatcctctgacgcaactctggctgtcatttgcgtggggctttcatagcgtaaacattcctcgactgcggtaccaataagatctggattttctctcagtttcaaaagctgttctggatgctgcagcagacaaaggactgaattgctgatgagattgaccgttgtctcatgtccggcgatcgccagcaatatgcacgtagatgccgcctcctcttccgtcagcttatccttttctctccccttcaagagcatgctgatcatatcctgttgagggtggcgttttctcttttgaatcagctctttgaaatatgccatagcctgcacagccataatattgccctctgttaatgcctttcttgagcgggtaaaatcaatcgtttgaatgagactcgcagcccactcctttaattgctccctatcttcctccggtacacctataatgttagctatgacaaaacttgctaaaggaaaagcaaagtccgaaatgacctccatcttttttttaccttgcacttgatcaagcaaatgatggacagtttcaatgatatacggctgataactctctgtcgttctcggcgtaaacgctccgctggcaagcgtccgcaatcgtctatgatcaggctggttctgaaacagcatcatttgattttgcacatgtgaaaggtcctgatatttggttgagctctcaggcagcggggtgcggactttgaatctcgcatctttcaaaatagcagccgtttcttcatatcctgtgacataccagcccgggtattttaagaaactccctttatagataggatgaacagctcgcaatgtgtcgtaaaaagaatatgggtttttcaaaaactcagaagatgcagttgacgatgcaattgtcacgtgattttctcctttctgttcaaaaataaaaacaatcgacatcataccgattgcttttattgattctttcagcttttcgcacttaaactagccttcatttcttcgactgattcaacttcaaagcctaaatcactcagcattttatgatcctccgtctcctcttgcccggcagttgttaagtagtctccgacaaaaatggagtttgcggcgtaaagccctaatggctgcaatgtgcggagattgacctctcttcctccggaaatgcgaatttcttttgatggattgataaaacggaacagcgccagcacttttaaacaatacagcgggtttaattcgttgacgccttctaacggcgtgccatcaattgcatgcaaaaaattcacaggaatggaatccgcgtcaagagccttcaagcttttggcgatgtcaatgacatcctgtttcgtctccttcatcccgataatggcgcctgaacacggagacagccccgattcttttgcgatttcaaccgtattgactctgtcatcgtatgtatgtgaggttgtgatgtttgaatggtttctctgtgacgtattcaaattatgattatagcggtctactcctgcatctttgagccgcttcgcctgctctggcttcaacagtccaagacatgcacaaatcttcagtccatacgtctctttaatttcctgaaccgcatctacgacctgatccacttctctgttagacggacctctgccgcttgccacgatacaatatgtgccgatattcagatcgtgcgcccgcttcgcgccttcaagcagcgtttccttattcaccatccggtaagactcaatcggcgctttcgaaatcgcagactgtgaacaatagccgcagttttccgggcagagcccggatttcgcattcataatcatattgagctttactttttttccgtaaaagtgttttctgatgtgaaaagccccgtgcattaatagcaaaatatcttcatcaggacaatgtaatattgaaagcgcctcttcgtcagtcacttctgctccagccagcacccggtctgcgagttccatccattgattcattctcatacccccacttgattcatcagtaatgatagattgatatggtcttttaccatatgtagaaccgtttctttcgtcacgttggcaagctttggcgtaacccctaaaatcggcacaccgcataagcgctcaatcatctcaggattggttttttcatcttcatcaggagagtcactgattccattgatgataattccggcgattggaagccccatgctttctgcatatttgacagttaaaaaggtatgattaatggttccaaggcgaggacgcgccacaataatcatgggaagctgcaacgcttttatgacatgactgaccaaatagtcctctcccaatggcacagaaataccgcctgcaccttctacgatgaagcattcatgtttttctctaatccgcccccaatggcttaaaacctcttccatggtgacagtctttccctcaagtttccctgcaacgtatggtgcaagcggcgccttgaaggcaaaaggcgtaatgtcttcatgagaaagactggtctgcgacatatctttcagcaaacttgtatcactatctggatgatggcgcgatatcccgcttaaaaatggtttatacaccccgacatgtctattattgtctttcaataaggcagcaagaccgctggatataaccgttttccctacttctgtatcagttcccgtcacaaaaaaacccctcaaatgatgtgcagctcctttccgattgaatgaaatgtttgcagcaaatgatcaatatcacccatactgtggtcagacgtgattgtaattcgaatccggctttcacccggcgcaacggttggcggccgaatggcaggagcataaattcccttgccctgcagtttttcagcaaataggaccgttttatgggcatcgccaatgactacaggaataatcggtgtgtgatctcctttcaccacataacccatattcttcagactggttctgatcatgctgatataagaaaataaaagctgtcgtttttccctgctggcttcaatgatgttgaaagcctcgtgagcagccgcacagctggctggcggaatagcggtttgaaagataaatgttctggcatggttcagcaaaaagtcgatgaagaccgctgatcctgccgcaaaacctccttccgcgccaacagctttgcttaaggtgccgataacaatgtcgggacaaacaccaaagtattcactcgttccttgtcccgaatcgcccaaaactcctgttgcgtgggcatcatcaacgaccacgaaggcatgatagcgtttcgcaagtgagatgatctgatcaagaggggcgattgtgccatccatgctgaatactccgtctgttacgataaaacggcgctgataacgctgtgtttcattcagcttgttttcaagatcattcatatcaatatgccgataaacaactgtatcagccttagaaagtcggcagccgtcgatcatacttgcatgattgagctggtcacttaaaatgacatcttccttttctggcaaggatgaaaggacaccgacattggccaagtaaccgctcgaaaacagcagggccgcttctgtcagtttaaagctggcaatcttcttttctagcttttcatgccagaccgaattgcctgtcgttaaacgtgaaccgctgcttcctgtcccaaattgctgcaatgctgtttgggctgcatcgatcaaacgtctatcgcttgcgagccctaaataattgtttgaggaccagaccgtttgattttcgccatcaatattcctctctggaaccggcgctccatccattgaccgcaggttacgatgtacgccggcttctttcattctgtctaaccgctcgtttaaccaggaatcaatcttcaaggctcgtaacctcgtggatcgcttgtttcataatggcaaccatttccgagagctcttcagctgtgctggcaagaggaggaagaaatgcaatcacgtccccaagcggtcttgtcagcattcctaactctctcatttttaaggaaactttgtatccaatccgccgatcagccgggtaaggttctttagtttcctttgatcgtacaagctctgcaccgcacataaagccaagctgccgaatatccccaacatgaggaagagcgtgcagatcttgaagaagaaaatggagctttttacttttttccgctacttgttccacaatgttttcagattcaaataatgccagattttcaagcgcaaccgcacagccaagctgattgcctgtataggaatggccatggaaaaaggtttttaggttttcataatcatcatagaatgccttatagatgtcttcagtggcaaacgtaacggcaattggcaaatagcctcctgtaatgcctttaccggcagccatcagatcaggctggacattctcgtgctcgcacgcaaacatttttcctgtacggccaaagcctgtagcgacttcatcaacgatcattaagacatcgtatgttgtacatagctcgcgcacgcctgccaaatatccttccggcatcacgatcataccggacgcgccttgtaccattgattcaatggaaagcgcggcaatttcctcatgatgttcctcaagcagctgtgcaagctctcggaggcactgatcacggcactcatcaggatcaccgctttcagaacgatacacataaggaatcggggccttgtaactctcgaacatcaacgggccgtatacgtggtgaaaaagctcaattgaaccgacactgacggcgccaatcgtatcaccgtgatacccgtttttcattgcgatgaatttttgtttctcgggcttcccgatgttcttccaatactgaaacgccatttttagggctatttccatcgcctctgcgccgctgtctgaataaaagacccgcgtgagcttttttgggctgatgtcgattaatgtttcggcaagctgggttgctggaacattggtcatgcccaataacgtggagtgcgcaatttttccgagctgtttttttatggcgtcatctagttcttttttgcggtgtccgtggacattaagccaaaccgatgaaaaaccgtcatagtattccttgccgtttatgtctttgactttgattccagtcccgctttcgatgattaaggggttttcatcataatctttcatttgggtaaatggcagccagaggtgctttttacttttttctatcaaatcatgagtcatgatcttcctcccactctattaaaataggctgcttctccaggtcatgtatgtacgtgtttacatcattggatccatcaataaaaaagactcggcagccctcttcagtcccgtattctttcattgctgtaatacgctgatagcccattttcttacccgcaacatagcctgttatgtaatccggatcgtccgaccagcataattctgcaacgactgccgggtgccggcttacctttgaagcgagcgcaagggcctcttttattcttgaatgagctggcacgtgactgtgaagcgcccatttttcaaaattagcgtccggccaatccattctggagacccgcacccctttttcttttgtttgatccattcgcttgcctgtatgaatatcaaacaacaccgcacccctgacatctgaccattcagggatttgttcatatgctttttcaatcacgtctcgtgaaacgccttctttttccaataacaatcgggcaagcttttgtccttcttccgggcagctcacttcattcgtatgcacaggcaatggctgaatggtttttatcgattcatgtacctcttcaaattgaatttgcataaaatcaggttttcctcttgaatgggataaccctttttctaataaagcattgactgtatgcttcatctcatggaaaggaataagccgttctccgccggatatatgctttccgccgtcttcatgagatccattcattgaagccctcattctgacactataaaaagtttcttcttgcatcatttctcgccctttcactgataactgaagaacgtgtagcgcttctcacctaaattgttaaccaattatattcaaaggttaacaattagaatatattattctctcctgtttctgtcaatagaagaaaggatcgatttatggcagttggttaaaaggaaacaaaaagaccgttttcacacaaaacggtctttttcgatttctttttacagtcacagccacttttgcaaaaaccggacagcttcatgccttataactgctgtttcgaaatgtcccgaagcagaacggaccactcggtagcaatcagcagctccctgtccagcatagacagctgtcaattctttttcgattttgtccacgccctcagccggcgttaaccgatcgtgtacaccaacaagactaaggtgcgggcgcggcgcgatcaggctttggatctccgatgcggaaaaatgctttgcaagcgatgggacgtaataataaaagccgtgcctgtcaagattctgtgttttgatcagcacgtgatgatccacctggctgcacaaatccacacacaccttaatccggtcatcgagcgccgctgtccaccacgccatcaaacctcccatagacatgccgatggttccgatcctgtcaggctgaacatcagagcgtgactgcatatagtctaacgcacttaaactgtcataaatcatcatcccccacatcacttttccggtgagaagcatttctttaaatatctcgctttccgcttttccccgccgatctccaaacccccaatgatcaatcgcaagaacgccgtatccgagtgaagtaagctcatcagaaaaagaaggcgttttcaaataatccgctccctcaatcagctcactttttcccctatcatactggcctccatgcgaatgctgaaacaatacggctgggcacggtccttctgttttcttcggcttcacaaaataagcgggcgccttttcatgtccatttaaatcgagcaggagcgtttcaacgatattttcttctctttcttcaatacgtaatgtctcaacactgattggcctccgatcaggcaaatcaccaagcaatcgaaacagttgctttcttctttcggctctcatcccatcacccttccttattcgcttacttcacatttacgagacagatctgggttcccctttatttttccaacataaatcacatcatttactaaatatttagtaaatattatggaatatttcgaaaacaattattgtaaccgcttacttttatatgataatatcaatttatcaaaaacagatgagttaatattttactaaatagatgagagggatacccatggttcgtattaaagatatcgccttgaaagctaaagtttccagcgcaactgtgtccagaattttaaatgaagatgagtcgctttctgttgcgggcgaaacgagacaaagagtcatcaacatcgctgaagagcttggttatcaaaccgttgccaaacgccgaaaatcccgcgggcaaaaacagcgggctcagccgctgatcggtgtgctgagctgtctgtcccctgatcaggaaaggcaggacccttatttttcttccattcggaaagggattgaaaaggaatgctttgaacaggaaattttcattacaaattcgattcatctcggctcctttcaggaacatatctttcgggaattggatggtgtcattgtcatcggccgtgttcatgatgaagcggttaagcatatcagcgggaggctggagcatgccgtatttatcaatcattcaccagatccgcaagcatacgattcgattggcatcgattttgaatcggcttcacgccaggcgattgatcaccttttcgacttaggctacaaacggttaggctacattggcggacaagaaaaagagcatacgctgaaggacggccaaagcattcgcagaacgattgaagataaacgcctgaccgcttttttggagtcagccgccccccagcctgagcatgtgctgatcggagaatacagcatgcgtgagggctatcgcctgatgaagaaagcaatcgatcaaggccatctgccggaagcattctttattgccagcgattctatggcgatcggcgcattaaaagcgctgcaggaagccggactgcaagtgccgcgggataccgcaatcgtcagctttaacggcattgaggaagctgaatttgccagcacgcctttaacgacggtgaaggtatacacagaggaaatgggccggacaggcgtaaaactgctgcttgaccgtctcaatggccgaacgcttcctcaacatgtcaccctgcctacaacattaatcgtaagacaaagctgcggatgtacagcaaaggaggtgacataagcaaagattcatcacgatgataaggaggaaaagatgaaacacacttttgttttatttctctctcttattctgcttgttctgcccgggtgttcagcagagaaaagctcagcagataccgcaaaaaagacgttaaccatttattctacaatgtcaaccgacagtgaaagagatacgttcagaaaactagcggcagcattcgaaaaggaacacagtgacattcatgtcagccttcatttcccaggcaatgactatgaaaatatgatgcgtgtcagaatggcggccaatgatttgccagatctattcgatacacatggctgggggaaaatcaggtacggagaatatacagcggatctccgggatatgaaatggactcaagatcttgatcccaatttaaacagcatcctcaaaaataaaagcggaaaggtgtatgcctatccaatcaatcaggcaaaagacggtctggcgtataatcgcaatattttagaccgttacggcattgctccgccggaaaccatggatgactttatcaaagcactgagaacgattaaagaaaagagcaagggaagcattgttcccttctggtttgccggatatgacaaaagctcattcgcccaatattacgaccaattcgctacacctcttctcatcacagaccctgcccataatgaaaaaaaacagctcatcaacggcacttttcaatggagtaaattcacttatttatcagaaatcctcaaacaaatgcagaaagaaaaattgatcaatatcgacgccgtcacggcaaaaaaatcacagctcattgaattaatggcccaaaacaaaatcgcctttacaatgcaaggcggcacactcggccaagacgttgcccagatcaacccgaacgtcaaggtcggcattatcccgacacctgccatccatcccggtgatgacccgatatggatcggcggtgaacgctacacccttgcagcatggaaagattcgcctcaattaaaagaggcaaaagattttatcgcatttatggcccgcccggccaatgccaaacaaatggctgaagccacatcgcttccttcagggctgaccaatgtgaaagctgatattttctacgcaaacgattatgagtattatcaagatgtcaaagtcgagccttacttcgaccggttatacttgccaaacggaatgtgggatgtcctgggcacggttgggcaggagctcgcggctgacattttggcgcctcaagacatttcgcagaagctgggaagagaatataaacgactccgggagcaatccgaaacacagggagctgaaaacaatgagtgagatcgcaagggacgttcatgtgaaacaggttaagccaaaaaagcagtcctcactttggtggatgtacattcctgctttgctctccgttctggtctttatgatttacccgtttgtgaaaggcacattgattacctttacaaactggaacggattttcacaagtctaccaatgggttggattcgcgcaatatgaaaggctgttttctgatcctgatacttggcatatcttaaaaaacacgctgctttacgggcttggcagcaccttttttcaaaatgtggtcgggcttctgtacgctctcctcttaaatcaaagcattaaaacgaaagcggtaacaagaacaattgtgtatttgccggtgatgatcagcccgctcattatgggctacatttggtactttttcttctcctatgacggaggcgcgctcaacgatttgctcggggtcttcggcatcagccctattaatgcgctcgccagtccctcgctcaatccatggatcattgtcatgattaacacctatcaatatgtcgggatcgctatggttgtctacttagccggtctgcaaagcattccgaaagactactatgaagcggcgcaaatggatggcgcgaaacaaggccagcagttttttaccatcacgctgccgctgttaatgccctccattaccattaatatagtcatcaacattatcggaggcttaaagctgtttgacgtcatcattgcactcaccgcaggcggccccggaaatgcgtcacaatccatgtccacgtttatgtatgatttgtatttcaaacggcaggatgccggctatgccgcaacgcaaggcatatttatggcatttgtcattttgatcatcagcttttgcgcgcttgcgtactttaaaagaaaggagacggaaatgtcatgagagccgcccgtacaaaaagcatgcggatcattacgcttcttgcagccattgtggcctgtgcgcattttattcctttttatatcctgctgaccacttcattgaaagcaaaaggagactacagttcgaaatggatatttccagccgacatctcctttcataatttttcagaggcgtgggagcgcgcttcgctaggaaactcttttataaacaccatgatcatcacaggtttttctgccttgttattaattatattcggctcacttgccgcctacccgcttgcccggcgggaaacgaaactgaataaagccgtttttgccttgctgatttccattatgatcatccctccgttaacgtccatggttcctttgtaccgaatggtcgtggacgccggaatggtcaatacacacgcaatcgccattttcatcaatacagcggcttacatgccgttaaccgtattcttatattcaggctttatccgatcgaccattccaaaagagcttgtagaagccgcaagaattgacggtgcaggcatgctgaaaatcttttttacgattgtgtttcctctgctgaagccgatcactgcgaccatctgtatcatttcttgtgtctttatttggaacgactatcaatttgccattttctttttacaagatcaaaaggttcagacattaacagtagccatggcaggttttttcggagaaaacgcaaacaaccttcatttagttgccgcagcggcacttatggcaatgctgccgatggttgttctgtttttggcgctgcaaaaatactttattgccggcctgtcttccggagcggtaaagggttaacattaaagggggaagcaatatgaaaaagattacatttatcggtgcagggagcacgattttcgccaaaaatgttttgggagactgcctgttaacagaggcactgaatggatttgagttcgctctttacgacattgatcccaaacgcctgcaggaatcccagctcatgctcgaaaatctaagagaccgttataacccaagtgtggccatcaacagctatgatgacagaaaactcgccttgcaaaacgcaggctatgtcatcaatgcgattcaggttggaggatacaaaccgagcacagtcatcgatttcgagattcctaaacggtatgggctgcgccagacgatcgccgatacagtaggcatcggcgggatattcagatctctcagaacaatcccggtcttatttgatatcgcaaaagatatggaggaaatgtgccctgacgcatggttcttaaactatacaaatccaatggccactcttacaggcgccatgctccgctataccaatatcaaaacaatcgggctctgccacagtgttcaagtgtgcacgaaggatttatttaaagctctcggaatggagcatgacggaattgaggaacgcattgcgggcattaatcatatggcttggcttttggaagtcaaaaaagacggcacagatttatatccagaaatcaaaaggagagcgaaagaaaaacaaaaaacaaagcatcatgatatggtgcggtttgaattaatggataagttcggctattatgtcacggaatcgtccgaacataacgcagagtatcacccgtactttattaaacggaattaccctgaactgatcagcgagctgcaaatcccgctcgacgaatatccgagaaggtgcgtcaagcagattgaaaattgggagaaaatgcgggatgatatcgtcaataataaaaaccttacgcacgaacgctcaaaggaatatggttcaagaattatagaagcaatggaaacaaacgaaccattcaccttcggaggaaacgtcttgaatacagggctgatcaccaaccttccttcaaaagcggttgtggaagtgacatgcgtcgccgacagaaaaaaaattacaccgtgcttcgccggagaactgcctgagcagcttgcagccttaaaccggacgaatattaatacacagctgatgacaatcgaagcggctgtcacacgaaaaaaagaagcggtttaccaagctgcaatgcttgatccgcatacaagcgcggagctttccatgaaggacatcatctccatgtgcgacgatttatttgcagcacacggcgattggcttccggaatacaaataaaaactaggggaccgctctcccctagttttttggttttgtttcgccttcccaggccatcatgccgccttcaacattgactgttttaaagccttgctcatccaggtacttgcagacgttcatgctgcgcattcctgagcggcagataaatacgtactctttgtctttatcaagggtttccattttttcaggaatatcccccatgcgaatatgaacggcttgcgggatcatgccttccgctacctcttcatcttctctgacatcaattaaatataattcttcgtccgcctcaattttttctttcaaagcggctgtgctgatttcttttatttccaaagaaaacactcctattcacagtgatcatgttcagtatatcaaagtcagccgaacgattgctattctgagactgatgaaaaaaaatccccttttggcaaaggggattttttctaggcttagtttgccacaatattgacaagcttcccaggcaccgcgatgattttccgaatcgttttgccttcaagctgctctttgaccttttcatctgcttgagcaagctgttccagctgttctttcgttgcatcggcaggaacctgtaatttcgcttttacttttccgttcagctgaacaacgatttcaacttcatcatccacaagttttgtttcatcatatacaggccaagcttcgtaggcaattgtgccggaatggccaagcttctcccatagctcttccgctaagtgtggcgcgacaggagaaagaagcttcacgaagccttccatatattctttcggcagttctgttgctttataagcttcattaataaagaccatcagctgggaaatacccgtgttgaaacgaaggccttcataatggtctgtgactttcatgaccgtttcatgatagacgcgctccaatgtttcacccgcgccttcaacgatttttccattaagctcaccgctgtcttcaataaataggcgccatacacggtcaaggaaacggcgcgcaccgtctaatcctgattcagaccaggcgattgaagcatcaagaggtcccatgaacatttcgtacaatctcagcgtatcagcaccgtgagaggccacgatttcgtcaggattgacaacgttccctttagatttactcattttttcgttgttttcgccgagaatcattccttggttgtacagcttttggaacggttctttcgtcggcactacgccgatatcataaaggaacttatgccagaagcgggcatacagaaggtgaagcacggcatgttctgcaccgccgatatacatatcgaccggaagccatttttccaatttttctggtgatgccagctgatccggattgtgcggatcaatatagcgcaagaaataccagcagcttcccgcccattgcggcattgtattcgtttctcttcttccttttttccctgtctcagggtctgtgacttccacccactctttaatgttcgcaagcggtgattcgcccgttccgctcggtttgatttcatccgtttttggcaaaatcagcggcagctcctcttccgggacagctgttgacgttccgtcttcccaatgaatgaccggaatcggctcgccccaataacgctggcggctgaagagccagtcacgaagacggtacgtcactttcttctcaccgtttttcgtttcttccagccaagcgatcactttttcaatcgcttcctgtttgtgaaggccgttcaggaaatcagagttcacgtgctcgccgtcgccagtataggctgcttcctcaacgttcccgccttttacgacttccttcaccggaaggccgaatgttttggcgaattcaaaatcacgctcatcgtgtcctggaactgccatgacagcacctgttccgtatgatgcaagaacataatccgcaatccaaatcggcagtttttctccgtttacaggattgatcgcatacgctcctgtaaatacgcctgtctttgttttcgcaagatctgtgcgttctaggtcactctttgattgaatttctttgatataagcttcaacagcttctttttgctctgccgttgtgatgttttccaccaatgcgtgttccggggcaaggacagtgtatgtagcgccaaacagcgtatctggtcttgttgtaaacactgtaaaggaatcatcatgtccatctatagcaaaatgaacgtgagcgccttccgaacggccgatccagttgcgctgcatatctttaatgctttccggccaatcaagctcttccaagtcctcaaggagcctgtccgcataagcggtgattttcagcatccactgcttcattgggcgtctctctaccggatggccgccgcgttcgctcttgccgtcaatgacttcttcgttggcaagaacagtaccgagcgcagggcaccagtttacaggcacttcgtcaacgtaagcaaggcctttttcgtatagctttaagaaaatccattgcgtccatttatagtattcagggtcagtcgtattgatttcgcgatcccagtcatatgagaagccaagcgcttgaatttggcggcggaagttatcaatattctgcttcgtaaacacagcggggtcgttccctgtgtcaagcgcgtactgttcagctggcaggccgaatgcgtcccagcccattggatgaaggacatcatagccctgcatgcgcttcatgcgggacagaatatccgtagctgtgtatccttcaggatggccgacgtgcaacccagctccagacggataaggaaacatgtccagcgcgtaaaatttttgtttttcattattatcaagagtggcaaatgttttgttttcaagccaatatgtctgccatttcttttctatctctttgtgctgaaaactcaaagtaaaaacctccttctgattgaatacggcgtgtatggttcaagtattgacgggaaggagaggattatattcagaatattcccaaactaaaaaaaactccctcatcccaaaaagggacgagagactttcgttttcccgcggtaccaccctcgttagcgcggcatacgccgcactcacttgatacttttaacgcagttatgcgtcagcggcttttcaccgctgcaactctgaggtgagttcggaaacaaacttgattgactttcaccagccgtcaactctctgcaacaatatctgtttcttactgctcctcttcattgttcttatcgcaaccgtaatctaactgtattttatagaattctgttcataagtgcaagcaggtttgtatacaatgggaatgtaccctgaacgggcggagattgaggacaattattcgggtggagttttggtttgacgtttggactcggccggttcgccgccgctgttcagttctctcacaaagtcaaaacttctgagaacagcttcaccgccgtagcctgagataatggataagatgacaagttgaattcctgaatcggggtcagcggataatacaagtaaaatggaagccgtcatgccgataaaccaatcttccaaaaatccaaggtagataaaccgcttcgtcattctgggcttctccagcctgcctctctttttcacatgaccgagaatccccatgattcctccaattacacaagcaatgagtacctgatgcagcatcttcatcatcaccttcctaaagcccttatttcgtaaagcgacttcaggccatccagcccccttaaacgattccgatgattttcgatatctacataccggcaaatctgtaaaaagcttgtttcttccattatatgtgaacacatgatcggtaagcttgatgcattggattcatttttcacccagtgacattgacctagtcacctatttagcatgtagaaaacctttccgttcatatgttcaaattctgttcttatttttagtgtatacgaggacaagccctaatgacaaacaacaaactgcacttgcttgaatcagaacatgtgttgtgctacggttactgtagaattcatttttaaaaaggggaatatcaggctttcgcatagcaagctgacggcctaagggggatttatatggctagttttcaatcatttgggataccaggacagctggaagtcatcaaaaaagcacttgatcacgtgcgagtcggtgtggtaattacagatcccgcacttgaagataatcctattgtctacgtaaatcaaggctttgttcaaatgaccggctacgagaccgaggaaattttaggaaagaactgtcgcttcttacaggggaaacacacagatcctgcagaagtggacaacatcagaaccgctttacaaaataaagaaccggtcaccgttcagatccaaaactacaaaaaagacggaacgatgttctggaatgaattaaatattgatccaatggaaatagaggataaaacgtattttgtcggaattcagaatgatatcaccaagcaaaaagaatatgaaaagcttctcgaggattccctcacggaaattactgcactttcaactcctattgtcccgattcgcaatggcatttcggctcttccgctagtcggaaacctgacagaggagcgatttaattccatcgtttgcacattgacgaatatcttatcaacatccaaagatgattatttgatcattgatttatccggattggcccaagtgaacgaacaaacggccgaccaaattttcaagctgagccatttgctgaaattgaccggaactgagttaatcattactggcattaagcctgaattggctatgaaaatgaataaactggatgccaatttttcgtcgctgaaaacatattcaaatgtaaaggatgccgttaaagtgcttccgattatgtaaaaagatcccgctcacccagctggatctttcagattgttgacaaaatcctaaaatggttttcattttaggattttgtcatcttttcagcgtgattgaaaacccttgaagtctaggaaggacgagcataggagcggagcgaatgttctaattcgtgagcaccgaagcgcaggcctgacaacgaatgcgagggtttgtcgacacgctgaaagatcccgctcattcggcgggatcttttattatgaagagattgatgcctgcttatttgtttctttagctgattttatccgtttgtcatatagaagcgttgtggcaatactgatcagcagcaataccaacagagataaaacaagagccctaatgccgtaatgatcgacaagcactcctccgaacaggggaccaatcattctgccgcctgtcgccgcactgttgacaaagccttgataaaagccttctttccctttaggggcaagctgattggcaatagtcggcacagcaggccaaacaagcatttctccgatagtcaggatcaccatcgcagcgagaaacatcggaaattgctttgcagtcagcagcatgctgaaagacacaataaaaatgataaagccgatgaccatttgcgcttttagcgactcggcccattttttcaccacaaaactgacgagcggctggccgagcacaatgagaattccgttaaccgtccacagcacgctgtataaggaaagagatattccaatgctttgtgtgtacgaagcaattgtggttgaccactgagaataagccagccatccgagtacatagcctccgcttaaaatgatcagtgcggcaaattttgctttgctgttcacagcatcataatcaagcacggatgtttgggatgcatcgcccgtttgaatatttcgaaatccgaaatatacaataaagaaaaagatcagatacaatacggcatttgccaaaaatacatatgaaaacgagaaagatgccacgacaccgccaagcgctgaaccaacggccacgcccgcgttttgcgcgacatatatcgcattaaatgccttccttcccccttcaggccataccgatcccgccattgcgtagcttgccggaaaaacaacaccggagccaaagcccacaatcgtcagcagcacaatataggctggccaatcatgaaaaaagacaagacccatcaggcttgctaacgtaatggctatcccaagcataatcgatttaaaaccgccgattttatcaaacaaaaaacctccgcataaattgccagccacactggcgccggaattcagcatcaggacaagtccggctactgttaacgactttcctaaatgattatggatataaatcgtattcagcggccataaaaaagaagcacccgtcacattgataaacattccaatgactaaaattttaagagcacgcggcatactcatccccctttcttacctaaaaaagctcatgaaaaaaacgaaacctaaaacggctccgtacgaatccagttatcatagcacattcattctatctgtctctctcacatttttcaactgatgagcgtgaaaaaatctaacaaatattgtttgaaaaatgtaaaataaatagaaaaaggggtcatattatggaaatggtattagcattcttaggttttctggcatgtctcattgcactgggctatggattatatcaccttgtcagatatgtactgaaaaaggaaaaacgtttctcaaagagacttttttggccgcttttcattggaggccttgtgctgctctttaccggggcagcattggcagaacctgacactgccgcagcaaatgccgagaaaaaatattcagcgctaaacgccgaatataaaaacctcacaaaagagcacgaagaacttgagaaagaatataaatctgtcagctctgaagcaaagaaattaaaagacaacaaagaagatcaagacaagcttgagaagcttaaaaacgaaaatagcgatctaaaaaagactcagaaatcattaaaagctgagattaaagagcttcaagaaaatcaaaagcagctcaaagaagatgcaaaaacggcaaaggctgaaaatgaaacacttcgacaagataaaacaaagcttgaaaatcaattaaaagagacggaaagccaaaccgccagctctcatgaagacactggaagttcttcaaacaatacgagtaaaagtgatgaaaccaaaacagctgacaaagcagaaggctgtaatatcaaaggaagcagaaacggcatctaccacacgccaggcagtacatactacgaccggacaaccgatccggctgaaatgttttgctcagttgaagaagctgaagccgccggttatcgggcgccaaaacgataaacaaaaagctccagaatgtctggagctttttctgtttcacaacgacgatttaatgaccttcttataataaagaactgacagaaaaccaaaaatggagtagagcgcagtatataacaccatcaccataatcataggcgcccatacctctgatccgaataagaaccagccggattggacggcaaagtaactgtggaagaggccgacaacgagcggaatgccgaagttgtacatttgtttgatgcgtatcccctttatcaggtcgccctgcgtaaagccgagttttcttaaaattgtatagctcggtttttcatcttcactttcacccatttgtttaaaataaaggatacaacctgatgtaatcaggaacgttaaccctaagaagccgacgatgaacatcaccataccaaacagtgatttttgcgcagcgcttgtatctagtcttgataaatgctcgtttttcttgttcacctgttgaaaaagctcatttgctttttccatttgatcgtcatgtttcacattgacgccgataaatgtagattgcgccagctgaatgcgggggtctttatccttgtccagctgtttaaacaggctgtcatccacaatgacagcgggcatgcccccgcttgtaaacgtgtaggacacaagaaactcttctcttaatcctttatattttaatggctgcgtctcgtgcttgctttttactttaataacaccagagtccttgaaaaccattattttttgcagcaagtcggtgtatcctgagaaaacggcttctccagccgccacatcgactccttttacatctttgtcgctaacaacagcaagctgcatattgccgggatcgccctgcatctctttcggagttccatccataatatttgcaatgtcaacatttgcttgcaggacaggtgttgccttttttacaaacgagatgttgctttccctcaatttgttttcaaataacttggcatctttctcattcatgaatgaaaaatcagccgctacattttgttcagcggtcttttccgacgagtaatacgagatgtaagcaagagataacagcccgatggcgagcgctgaaacggttgtaataatcgtcagcagcagcgcattcgatttcattctgaacatgatcgaagacagtgacagaacctcagaaatatttaagtagccgcccttgctttttcgaatgatattcgagataaacgtaactgatcctttataaaacaaaaacgtcccgataatgacgctccccagaatgaagctcatcgcaacaaacagttcattaatggtcttaaattttccgccaaacagctcagaagacacatagtatcctgtcaaaatcaacacgatgcctaaagcgccgatcagcatttggaaaaatgatattttcttcactttgtcttcagtggaggacgttactttaaacaaagataaaatactctgttttttgataaacgtataattcatgatcatgatcaaaaggtaaatgccgcagaacacaatgaccgtttggaccaaggcctgctcagaaaaatgcagtttcgcatccgctttgacatcgacaattttgaacagaatcatcaagacaagcttcgatatcgaaaacccggccgctaccccgatcgctaatgaaccgaaatacagcatgacattttctgcacttaagatgcgaaaaattttatgcttcgtcattccaattaattgaaacagcccgatttctttactccgtctcttaataaaaatcgtattggcatataaaatgaagatcgccactacagccacaagcaaaatcgaagcggttttaatagccgcggctcccttgattgaagccttcacttcgttaattgctggatcatactgcagcgtgacaaaggcgaaataaagcgccacgctaaagatgagcgcaaacacatacaaatagtaattccggagattctttttcaaatttcgcaggatgagctgattaatgttcatgctgcaccccgcctaacacgccttgcgttttcataatatcctggaaaaacgtttgcctgtcctggccccctttattcagctgtgtatacatttgcccgtccttaataaaaatgactctgccgcagtagctggcagcgacgggatcatgggtaaccataataatcgtcgcgttgcgtttttgattgagctggctcagcttatttaatagatcggaggccgatttcgaatcgagcgcgccggtcggttcatcagcgaaaataatgctcgggtcatgaataaacgctcttccagcggatgttctctgcttctggccgccggaaatttcattcgggtatttatcccgcaattcatatattcccagttccttggcaacttcctcaaacttgcgattggcttccttttttgatagtttcgtgatcgataaaggcagaaggatattctctttcactgtcaatgtgtctaacaaattgtaatcctgaaagataaagcctaaatgctgttttctaaattcagccagctgcttttccttcatagccgtcatgtcatttccattaatatgaatggttccgtgactgacctgatcgattgaggacagaacgttgagcaaagtggtttttcccgacccggaagcacccataatactgacgaattcgcccttttcaatgtgaatatcgatgcccttcagcacttcctgtttattcagcttgtttccataactttttcgaattttattcgcttctaaaatcaccatttacgcagtctcctttatattggataatctcattataaaaaggaatgccgggcttttccttcgatacggcgaacaaaaaagaaaagcatgtgacattttcgtcacacgcttatgacatgttcaaattgattccgtattggaaaggttaatgtaaaaactgttcccgcaccaaactccgactcaacatcaatatggatcaataacggcgccgctgctttttttgccaagtacagccccatgccagttgacgcttgatcatggtgatccgttgtggatgtaaaccctttatcaaaaatacgcggtacatcttttggatcaatgcccctgccacaatctttcacttggagctgcgtctgttcccctttttgaaagcttttgatctcgatttcagaggcttcgctgtatttcaccgcgtttgtcagcagctgcctgatgataaacgccagccattttgcatcgctcagcacttctttggcctcgagctgtatgtcaaaaccgatccctttttggatacaccacgattgtaaatctttgatttctttaaagatcaaaggctgaagctgaatgaattctactgacaggtcgttttcaataaatgaaatgcgtttttgatgaagctgctgatcaagaagcaggtgaatacgcagccattcatatgacagctgggatttcagtgctttttcttccattctatcaatgattaaatgcatcgctgttaatggagttttgacctcatggatccatgccatcagctcatctttttcattttccaatgctaagcgatgccgtgctgcggtctgcttcaagtgttctgtttgcccggcaatgcttctttcaaccattgcttcaaacggcgtttccggttcatttatggctgtcacatcgagattgttctcccatgttttcaagcttttataaaacgctgtttctttccgatagcggaaccaaaggaatatgataaaaaacaagatgcacaaatacaccatataaagtacattcccaaatgatatggaaggatcgacaaaagcaatgaacagcatcaaagcctgctgaaacaaaaacgcggcaatccagctccgcctttcgataaggaatgctttaatcatagaacttgtcctcttccttcgcgatgtagccctggcccacctttgtctcgatatatgcaccaagctgcagggcgtccagtttttttcgcaggcgattgacattgacggtcagcgtattatcactaacaaaacgctcatcgttccacaagcttctgatcagctcttcccggctgacgatcttgtttttttgctctattaattgttttagaatgaacatttcatttttggtcagttcaacagatcctttgtcattgctgacgaggttctgctccgcgtctacagcagcgccgcaccacgttttaatcgtactcggctccgtattataatggtgcacacgccggaacatcgcttggattttcgcgatcagcacatcaaaatgaaatggcttttgaataaagtcatctgccccgagctgcatggacatcaccatatcagcaggatgatcccgggaggataaaaagagaatcggaacatttgaccgggagcggatcagacggcaccaatgaaagccgtcaaatttaggcagctgcacatcaataatgacacaatcaggattaaccgccgcaaattcctgcagcacctgactgaaatcctgaatgccgtatacatcataggaccatcccgttaaacgatccttgatttcatgaaacagcgattcatcatcttcaatcagcaaaagtttaaacaatcgactcaccgcactttttccttttttatcaagtgtatagcaaaacgccagcatgcgctatagaaaaagccggctgtctcagccggctcgttcgcattataattctcttctcaacgctgtcagcacgttggttttggtagcttttctcgccgggttcattccggaaatgactgcgacccctccgcaaatcacaacggcaatgatcacaaggctcgccgggatgtaggagaatgtgtaattcaaatcgcccgcatcgccaccgcttgtggccgcaagaatcatcggaacggccaggttgacaaggtagctcacgccgtaagaaatgataatcccaatcacacagcctaaaattccgatatacgcgctttccatcaagaacattcggcgaatgattgacgggctcgccccaatcgctttcataatgccgatctcttgcgttctctctgtcaccgccatcgtcatcgtgttaaaaatgccgatcgctgaaatgataactgcgatacatccgacaaagatcagtccgattttgaagaccatgaagaaggtattggctccctcaagttcagtagtcactgatgtgacatagtacccgtcatctgttagatcatttgtcagctgttccacattctcaaacttatcagcaaaaacaccaatgttcgtttcaacatttccgcctttgaaatctaagaattccgaaaaatcttttttgaattgatcactgataaaaatatttgagtcctccatccagtcttgagatggtttttttgtaataccgacaattttaaagtcatatgtttttgtttttgtaacatcccctgttttagaatctgtcttcgatacacttagttcaattgttttatttagaatatctttcgtatagccctttggttcttttatatcttctggatttccttttgcttcctcgatttttttgttatattcttccgattcttttttcgttaataatctctttgcgaagtcgtatcctactacgatttcattttccgactttgcgactcttcccttttccaattccatattggcctttaattcatcattcatattagtaaaaatgagatttgagctttcatttgtacgattgcctaaagtagctttgtttggttcatacacttgcgttctttctacaactgaccttacgtgatcatacttctctaaatcagcttttttaatcggcttgtctccttccttgcccattacgctgactttcgttacaatctgctggctcattgtcatatctgtaatcgtcttttgaatcccaaatccaacggacgacaacacaaccaaaaacgcacacgccattgttgtcgccagaatcgtcataaagacgcgaagcctgtttttcttcatatttcttctgataaaatgaacctgatccttaaacctcaacggtaattcctccttttagcacaccatcatgaagctgaaattttgaatgtccgatagaagcgacttcatcatcgtgagtaatgatcacaaatgtaatgccacgctcacgattcagctgctggatcaattccagcacttcatgttccgtttctgaatcaaggcttcccgtcggctcatccgctaagataatcgaaggatttaaaatcaatgctcgagcaatactgacacgctgctgctggccgcctgacagttcattcggataatgagcggcgtggttttccagaccgacgcgtttcagcatgtcctgcaccttttgcttccgctcagatggcttgattccttttaacgccagcggcatttccacattctcatacgtcgttaaacccgggatgagctgaaagctctgaaaaataaacccgaaatggtcaagccgaaattgcgcccattccttttcattaaaccccgtaacatcagtgccattaatgacaatccgcccttttgtcggcgatatgtagccggaaattaaattcaaaagcgttgatttccctgagccgcttcgtccgacaatgcaggcgatttcccctttcgccacgctcaatgaaacatccttcaatactggaacttcattctcacggcccttttttccgatcgtgaaagaatggtcgatatgctgaacatcaatcatatgttctctctcccttacaaaagtttcatttttttataaatcgcaaaataactaatcaagaaaccgattaccgcacctgtacccatgccaatgagataaccggcaaagctctcgcttgcagtaaatccaaaatagccgaagcccatgattcctatgataataacgatgatctgcaccgggcggttaagcggcttccataagaagaaatatccgtttctttcattagacattttaacaaagctaatatagccgatgatgtaaaaaatgatagtcatgatagccggaatgactaaataatatggtgaattctcagcccatttcgagtctacataaattatcggaatgaaatactgcacccatttaggtactggaccatggataaaatctattgatccgccaaaaaggatctcgaggttgatcacaggcaggctgatgagtaaaaacggcgaaatggccacggtaaatgagactagaagctgtgcgaaactattgcctgtcaaagctcctccggccataaccaaagaataagccagcatgctaacaataatcattcccaagctgtaattgtgaaaataaacggcctgatctggcttcaaaagcatgatcagcaaaacagacaaaacataacctatgagctgcggcaccacaatcaccattccgccggtaaggaacttcgcatgaaatatctgccctcgtgtatatggaaggcttaatgtaaaatcaaagaagctcttgctacgttcaatcccaagctggctgaccgccaaaacgactccccaaatccaaaacaatgagataaatgagctatttaaataatcaacgctgaatacgcaggggccgacccaattttcttttccagtgacacagccttgatagatgagatacatatttaaaattgataatggattacctaatataaaaaccaaaatggtgataactaaggcgactttattctgccgccactctttgtaaagcagtccggaatccggcaactcacttccctccaaacctaaggcatttcttacacttttgttttcttataaatagagaagtagctcacaaagaatccagccactgctccaatgatcatacccaaaatataaccaataatggaatgtccggtatagtatccaaataaaccaaatccaaggatgccgaaagccataaccagaatttgcaccgggcgatctaatctgttccataagaaaaagtgtccgttccgttcacttggaagcttcttgaagcttataaagccaatcaagtaaaatagcatgctcattacggctggaatcaataaaagatatttactgttaatcagccattcatttacaacgtaactaatcggtactaggttcgataaattgcttgccagagagaaataactctcaggggaagggaatatttcccatatattcgcaccaaaaacaacttctaggtttccaaccggcaatgcaataattaaatacggcaatatagctgctgaaaacgccgttaacagttgggcaaaagcatttccagttaacgctccggcggccatcaccagtgaaaaagccataaaacttatcacgattactccaatgctgctgtgctcaaaaaagtagacgtgttcagggttatagacaagaatcagcagccatgcaagtaaaaagccaatcaattgtgacagcacaatcacaaaaccgcctaaccaaaattttgtctgaaaaatttggcttctgttatacgggaggcttaatataaaatccatcgtgcctttcgaacgctccattccgaggaagcagaccgccaaaatgacacccggcacccagttgatatctatcagattgcttatggaataattcacaataaaatcacaatattgcgggtcttggcgatcaagacacccttgataagacaaatacgtattaacgatagaaagcggatttgccaatactaaaaacgcgatacttaacaaaatcaccacttgattctgcttccactctcgatagaggagacctcggtctaccatctccgcttccctccaaacttcgcaatgaacacttcttccaggttgacaggaagctcattccacacttttggcttcagctctctcaaaaagctctttttctcctcatcgcttttcggaatcagcactgtgtaaaacacgccggcctgatcgagcatcggaatgttttgctctctgatggccaaattgacatctgtatcgaaggccatttgaattttaatgtattcttcttttaactcatcaagatccatgacgttggtcaggctgttatcttcaagaaaaccaattcggttgcacatccgctctatgtcttcaagccggtgggacgtaatcaggatgctcgtatcacgctctgccacttcatcgaccatcagctgcagcacatcatgccttgtcaccgcatcaataccatccgtcggctcatcaaggaggatcagcgccggtctcgccgcaaacgacagaacgagcgatagctgcttttttaagcctgtcgacagctcacggtattttttcgtttccggaatttcgtatctgttcatcagctcattcgcgtacgtgacatcaaatttcggatatattcttctcaaaatatcgactaactgcttgtatgtatacttatcgtaaaacggattttgaacaggcatgtagatgatattttgtttgactttcgggtgctttttgatttctacgccgtcaaataaaatcgttccgctgtcagcgaaaatgatttgctggattaagcgaagcatcgtcgttttgcccgatccattgcgtccaagcaatccaaagatttctcctttttcgattgttaatgaaacatcttttaatacttgattgccgtcaatcgcttttgacagctgccgcagttcaatcattttttttgcctcccttcacatcagcgctgatttcctttatccattcgtgcagtttttccagctcaacccctgcatagtgtgcatcgatgatgagctgtttgagttgctctttaatcatcgtcatcttcccttcaaccagtgtcgtttttgcattctccgatatataggtccctctgccccgcagcgtttcaataatcccctctcgctcaagttctttatacgctttgctgacagtgttcggattcgcaataatgatcgttgccaattctctgacagaaggaagcttatcaccaggcttcatgatccctttcaaacaaagctctttcatttgctgaataatttgttcgtaaatgggtgttgagcttcttggatcgatttgaatcatttacttccctactttctatacgatctgaaccttttatagataaaaatgatcaattatacttttttgccattcaaaaccgatcatcacaagaacaagaaaaaaagaacaagcgatcacagatgccgcaatcagcattggcacgttacgtttgtttcgttttttatgtttcataactgcctcccttaatgtcaatatataaatgattttatattagtgtctatagtgtattacttcaattagtacacttaatacaataaatactttgactcacaaagtcaatcctttttttacaaaaaaacggacccttttaaaagggtccgttttcctacacatcaagagggtgctgcaggatcatattattttgcaaagattgaagctgaagtctcattctgtacagctgttctctctgctgatcatttgacgacagccatagtttattcaaggcatttaccgcatcttctagctgcatttgtgcatcactatattcttgatcgttataatgctcttgtttagaagcgattttcagctgttcttcagcataatcataggcctgcatacattgctggagatgttcatctactgattgtcttgttgccacagtaacccctcctcttggtaatggaaatcatccatcattcatattgtagcctcatctgactttattcaataaagtaatttatggtcgatattcatttgttctcttgtgaaatgcgtgctacaattttaggatgcaatcgtacgcaaggaggcacatgaattgtgatgcagaacaatccttttccttattcaaatacggaaaaacgctatcatacattgaattatcatctcagagaacatttcggccataaggtgtttaaagtagcgcttgacggcggttttgactgtccaaatcgggatggcaccgtagcccacggaggctgtacgttttgcagcgcagcaggctccggagattttgctggaaaccggaccgatgatttaattacgcaattccatgacatcaaaaaccgcatgcacgaaaaatggaaggacggcaagtacatcgcttattttcaggctttcacaaacactcacgccccggttgaggtgcttcgtgagaaattcgaatccgtcctcgccttagatgatgtggtcggcatttcgatcgccacacgcccggactgtctgcctgatgatgtcgttgattacttggcagagctgaatgaacgtacgtatttgtgggtggagcttgggcttcaaacagttcatgaacggactgcacttttgatcaaccgcgcacatgattttaactgctatgtggaaggcgtcaataaattaagaaaacacggcatacgtgtctgctcgcatattatcaacgggctgcctttggaagaccgggacatgatgatggaaacggcaaaggccgtcgcagatttggatgtccagggcattaaaatccatctgcttcacctactgaaaggcacgccgatggtcaaacaatatgaaaagggcaagctggaatttctttctcaagatgattatgtgcagctcgtctgcgatcagcttgagatcattccgcctgaaatgatcgtccaccgcattacaggtgacggaccgattgagttgatgatcgggccaatgtggagcgtcaacaaatgggaagtgcttggcgccattaataaagagctagaaaatcgaggcagctatcaaggaaagttctttcaacggcttgaggaggaatcagcgctatgattttgaagaaaattcttccttacagcaaagaactgctgaaaatggccgcgggagagggagatattgtcgtagatgcgacaatgggcaacggacatgatacacagtttttagcggagcttgtcggtgaaaacggccatgtatacgcattcgacatccaagaatcagccgtggccaatacaaaggaacggctcggtgacatgtatcaagcgcgaacaacgttatttcacaaaagccatgataaaatcgctgaatccctcccgcctgaaacacatggcaaagtggcggccgcggtatttaacctcggctatttgccgggcggggacaaatcaattacgacaaacggcagttctacgatcaaagccattgaacagcttctcagcatcatgaaagacgaaggtctgattgttctcgtcgtctatcatggccacccggaaggcaaagctgaaaaaaacgacgtgctcgagttttgccgggacttggaccagcaaacagcccgtgtattaacatacgggtttatcaatcagcaaaatgacccgccatttattgtcgccatcgaaaaaaaagctcagatcagcaaatgatttgagcttttttctttgaatttttcatccaggacattttttgaaatttccggtaggctctgccgttgatataaaagaaaagggaggtttttccgctggctttgatcagcttctttgcgagccggcccatttccttttggcctgccactttatcatctgacaaataaacgccaagcaagccgcgattgattaaacgatggaagttttcatgcggaatgccttgtaaatgctcgtcggctttatggataaagtgttcaagccggtccatcatctcttcatgagactgataatacgagcagaaattcaagtctccttccagcaagtcctcctcttgatcaatcaaataatcaagaagaatatgaagaccctgtatgtaaggaaaataactgtctcggatttttttagcggtgctttctgtgaaatcaggctggaacgaatacgcaaccagacagaaaatgcctaacgttgagcctgcacaggctggaaattcataccattccatctcaggcagctctgattcatattgagtaaaccacttttcaagccgcggaacacgctcatgctcaataacgtgcttatgcacctgcaaatcgcaataatagccgcacagttcaagcagataaggtttaatcatgtcatagtgctcaatggagccgagaacacgctggcacgttttaaccagttcatgcaaatatccgctgtcatcctgttcttccctgaattgataatagttttgcagttccgccccaactgtcagtgcgtcctgcattgaggcatggagcatccgaaaatcctgcgggtccagcgaggtgctgcggtcacacagattgtccaaataatcactaatcgtttgatacgcgatgataaactcgacacatttctgcttttggctgcctgacaataaggccagtatgccgccgccttcacagtgaaacgttttgtcccgaatacttgcggttgcctgtgctttcaattcactgttatgaatcgattctgatttttgcttccatatgtccagctcttgatgaacgagcggaaaaatatctcgatatacctttgccatcaatccaaaaggatgttccggtactgtcaacacatgcaccccctactagttcaaatatattgatcagtaaacgctcttgctgctttaaaaacatcttctctctcgggttcattgaagatctcatggtaaagcccttcccactctctgtatgctttattatgagaagcaacaccattaaaccacttgatgaccatcgttttgtcaacaagcttgtcatcaccggcttgcatcacaagaagcggaactttcaaaaatgcctctgtcggcaccattgccgattcaattgtctttaaaagctctctgtaccatctgacagaaactttcctgacgtataacgaatcattttggtcagcttcgatgacgtcctcattgcgcgtcgccatatcaattgataatcccgaatcaaccttaagtgacggagcgatgacattcaggccttttgatgcaagatcaagcgctttattcactttaatttgcagtccgagacacggtgatgataaaataattcccgtaatccggggatttctttgctgtttaacccattcaatcgcgaccagaccgcccatgctgtgacctagaagaaaaaccggaagatcaaaggttcgcgctttatctatccaagcatctacttcatcaatgtattcttgaaacgagcgaatatgccctctcgctcttgtcgttgttccctgtccaggcaaatcgcccatgacaacgtgataacccgaagaccgccacatttcaatcagccatttatatcgtccgtgatattcacttgccccgtgaatgattacaatcacggcaacaggtctgtctgctttccaggtccacatgatcttcacctcatacgaaatttaaatagagaaagaaggatgaatcttatgatctacccttataaggaacacaagccagatatccacccaacagcctttatagctgataatgcaacaattaccggtgatgtcgtgatcggagaacagtccagcatttggttttctgttgtcataaggggagatgttgcgccgaccagaatcggaaacagagtcaatatccaagatttaagctgcctccatcaaagcccgaacaagacgctactcattgaagatgacgccacgataggccatcaggttacacttcatagcgctgttatccgcaagaacgccttaatcgggatgggctcaatcattttagacggagccgaaattggcgaaggcgcttttattggtgccggcagtcttgtcccgcccggaaaaatcattccgcctggccatctcgcctttggccgccctgcaaaagtcatccgccctttgacggaagaagaccgaaaagatatgcaaagaatacggtcagaatatgtagaaaagggccaatattataaatttcttcaacaaacataagacctgcttcgtcttactttaccatttttcaaattatatttgaaagcaataaccatcgttaacccggacgtcatacagttcgggtttcgatttttccataaaacgttcacatatagcatgaaacgtatgacttttatcttatcacaaaactataaacagcctctgcaaaaacacatacctattctttcctgttctctattttctatgagcacacacaaaaagagcccactgggagctctttttgtcagctgatatttcgttcgctggcagcagccgcattttttttatgaaacccttttccatagtacacagccagcaagatgagaaaccatatcggcccgataatcacggctactcttgtatcagggctgtaagccataagaatgacgacgaatgctagaaatgccaatgacacataagacgtaaacggaaataaaggcattttgtactttaattgtttcttttcttccggcttcaaacttttcctgtattttatttgagaaagcaaaatgattgcccacgtccaaatcgctccgaacgtcgcaatacttgtaacccaagtaaataccttcgcagggacaacatagtttaacagcactccgactaataaagcgcccgctgaagccagaacagctttacccgggatgccgcctttcgtcagctgaccatatgcttgtggcgcctctttctgttccgccaagttaaacagcatccgccctgtgctgaaaataccactgttgcatgaagacagcgcggctgtcaacacgacaaagttaatgatacctgcggccgatggaatgcccactttttgaaatgtgagaacaaatggacttccttgagagccaatttcctgccacggataaatagacataatgacaaataaagcgcctacataaaaaatcaaaatccgccaaaatactgtatcgattgctttggctaacgatttttgcgggttttttacttcgccagccgtcaccccgatcatttcaatccctaaataggcgaacatgaccatttgaagagacaataaaaccccttttaatccatgagggaaaaatcctccgttgttccacaaattgctgattccggttgcaatgcccccattgccgactcctgcaataatcatcaataaaccgacagcaatcatggataagattgcaacaattttaatcaatgcgaaccaaaattccagctcgccgtaagctttgacagccaggaaattaacacccgtcataatgaccagtgccgataacgcccaaatccagtttggcacgtccggaaaccagaaccccatatagatgccgacagcagtgatttcggccatacaggtgacaacccataaaaaccagtagttccaacctgttaaatagcctgcaagcggtcccaaataatcacgcgcatacctgctgaaggagcctgcgaccggtttttgaatggccatttccccaagcgctctcataataaaaaacatgaccaggccgcttgcggcatacgctaccaaaataccaggccctgctaattgaatagctgatgcggagccgaggaacaaccctactcctatagcagctcctaaagacattaaagaaatatgcctttcttcgagtccgcggtgcagctcttgtttttgtttttgcatgcttcttctcccctagaaaaaaatatcattatatcatttttctgaatattccgtacggattgggtaaatcaatgatgatggagaaataaaaggataacaacaaggctttcgactactcgaaagccttgttgtctgttacacaaagatgacttctttaggctgatggctcagctcttcaggcatataccgtttttcaatattgatgctgtgccagatcataaagattagcacagtccaaattttacggctgttatcagccttgtccgcacaatggtcttcaagaagctgaaggacataatccttatggatataagcatccgtttggctttcttgaataatattccgcacccattcgttcatttcgtttttcagccaatgacggatcggtacagggaaaccaagctttttgcggtttaatacgtgctcaggcacaattccttcagcggctttgcgaagaagatacttcgtcgtgccgttcttcgttttcagctcatcaggaatttttgaagcgacgtcgaatacgactttatccaagaacggcacacgcagttccaaagaattcgccatcgtcattttatccgcctttaacaaaatgtcgccgcgcatccaagtgtggatatcgacatactgcattttgttgatatcgctgtacgagctgctttctgtaaagtaagtcttcgtcacatcgcgatatgaaaggttcggattataatgcttcaacagctgctttttgacagactcttcaaagattttcgcgttaccgatataacgatcctgaagcggagtgcagccgcgctcaagcaggctcttccctctcataccttcaggcataacggcagcaacgtgcagaagcatctttttcaagccggacggaatccgttcaaacggtttaagcgaaagcggttcacggtaaatgttatatccgccgaagagctcatccgctccttcacctgataaagcaaccgtaacatgtttttttgcttcttttgcaacaaagtacaacggaatcgctgccggatcagcaagcgggtcatcaaaatgccatacgatcttcggaagctcattcatgtattcctcaggcgaaatgactttgctgatattttcaatgcccagcgccgctgccgtttctttcgctacatcaacctcactgaagccctgctgttcaaagccgacagagaatgtttttaagcttggatgaaattccttcgcaacagacacaataaaggaagaatcaatcccgccagacaggaacgaaccgacaggaacgtcacttctcatatgaacgtttacagagtcatagatcgcgtctcggacttctttcacaagcttgtcttcttcagtctgaaccggcttgaagttcgctttgaaatacgttttgaatgtgatatcgccgtccgggcggattgtgaattgtgaacccggctctacttttttcacatgggcatcaagcgtgcttggttcaggaacaaattggaaagacatgtactgctgcaatgcctctttatctatttcaatatcattctgagcaaccattaaactttttctctctgaggcaaaataaacctgatcattgatcgttgtgtagtacaacggtttaatgccgaatggatctcttgccccataaagcacatgatcgtttttattccaaatcagaaaggcaaacataccgcgcagtttggacgccgcttcttctttatagtgacggtaagtcgcaagaagaacctctgtgtccgaatccgtgttgaatgtgtacccctttgcttcaagttcttctctcagttcgatatagttatagatttctccgttaaagataatccaatatgtttcatcttcatatgataaaggctgtccaccattttctacatcaataatgctgagccgtctgaatccgaagccgacgtgctcatcatggaaatatccatcactgtcaggaccgcggtgaacgatcatttggttcatttgtttgattagttcttcttgatcagcggtttgagctaacggatgcttgttaaaaaccccgacaaatccacacatagtattgcctccataattaaaattgtcatcattgaacccctatttatagacgctgtgaatagtatttggtttcacagttatgtaaaaaaataaacatgaatacaacgataaaaaagggaaagccgcttaaccagtaagcggctataaaattattctcctaacgcttctttacgcagctgctccgctttgtctgtgcgctcccatggaaggtcaacatcgtgacgtccaaagtggccgtacgcagcagtttgtttatagatcggacggcgcaaatcaagcattttgataatgccggcaggtcgtaaatcaaagttattgcgaacaacttcaatcagtttttcctcagaagcttttcctgaaccgaatgtgttgattgagattgacacaggctgtgcaacaccgatcgcgtaagcaagctgtacttcgcaagaatcagcaagctcagccgcaacgatgtttttcgcaacgtatcttgccgcataagctgcagaacggtctaccttcgtcgcgtccttacctgagaacgcgcctccgccgtggcgtgcatagccgccgtacgtatcaacgatgattttgcgtcctgtaagtcccgcatccccttgagggcctccgattacgaaacgtcctgtagggttgatgaaatattttgtttcttcatcaatcagctcttcaggaacaaccggattgattacatgttctttaatgttgcgctgaatttgctcaagtgtaatttcagggtgatgctgagttgaaataacaatcgcgtcaatgcggactggtttgttattttcatcgtactcaaccgttacctgtgttttgccgtcagggcgaaggtacggaagaatatcttctttacggacttcacttaggcggcgggctaatttatgggcaagtgaaattggaagaggcataagctctttcgtttcgttgcacgcataaccgaacattaatccttggtcacccgcaccaatcgcttcaatttcttcgtcgctcattgtgccttcacgggcttcaagcgcttggtctacgcccatcgcgatatcagcagactgctcatcaattgatgttaaaaccgcacaagtttccgcatcaaatccgtattttgcacgtgtgtatccgatttctttaatggtttggcgaaccgttttcggaatgtcaacatacgtagaagttgtgatctctccgcttacaagaaccaaacctgttgtcacagatgtttcacaagcaacacgcgcgttagggtctttctttaaaatttcatctaaaatgctgtcagaaatctggtcacagattttatccggatgcccctccgtaacagattctgatgtaaataaacgacgatttttactcatgatttgcttcctcctgcacaaggcctcccgaaagaccttgtatatatgatacggaactcgctccctcttatacaatgtacagttatattagagaatgttaattggcatatttatgaaataaaaaaaccttttccatcgaggaaagggtttggtctttgtgcctttcactcttatcgctcaaggaatcatacaaccttgcaacaggttagcaccttggttgtctcactcagttgaacataataaataacagagaaaccggttgctgggcttcatagggcctgtccctccgccagctcgggataagagtatccgctcaatgaaatatcttatcgtaaaagggtttgcaatgtcaatatgattcagaagaaataggcacctatattgagggaaaacaatggaaatgcacacacaaaaaacaataaatagtatagactatttgaaaatatatgttatactaattcacaattagcaaaacacaaaaaacgataaaggaaggtttcatatgaactcagttgatttgaccgctgatttacaagccttattaacatgtccaaatgtgcgtcataatttatcagcagcacagctaacagaaaaagtcctctcccgaaacgaaggcattttaacatccacaggtgctgttcgcgcgacaacaggcgcttacacaggacgctcacctaaagataaattcatcgtggaggaagaaagcacgaaaaataagatcgattggggcccggtgaatcagccgatttcagaagaagcgtttgagcggctgtacacgaaagttgtcagctatttaaaggagcgagatgaactgtttgttttcgaaggatttgccggagcagacgagaaatacaggctgccgatcactgtcgtaaatgagttcgcatggcacaatttatttgcgcggcagctgtttatccgtccggaaggaaatgataagaaaacagttgagcagccgttcaccattctttctgctccgcatttcaaagcggatccaaaaacagacggcactcattccgaaacgtttattattgtctctttcgaaaagcggacaattttaatcggcggaactgagtatgccggtgaaatgaagaagtccattttctccattatgaatttcctgctgcctgaaagagatattttatctatgcactgctccgccaatgtcggtgaaaaaggcgatgtcgcccttttcttcggactgtcaggaacaggaaagaccaccctgtcggcagatgctgaccgcaagctgatcggtgacgatgaacatggctggtctgatacaggcgtctttaatattgaaggcggatgctacgctaagtgtattcatttaagcgaggaaaaggagccgcaaatctttaacgcgatccgcttcgggtctgttctcgaaaatgtcgttgtggatgaagatacacgcgaagccaattatgatgattccttctatactgaaaacacgcgggcagcttacccgattcatatgattaataacatcgtgactccaagcatggccggccatccgtcagccattgtatttttgacggctgatgccttcggagtcctgccgccgatcagcaaactaacgaaggagcaggcgatgtaccattttttgagcggttacacgagtaagcttgccggaaccgaacgtggtgtcacgtctcctgaaacgacgttttctacatgcttcggctcaccgttcctgccgcttcctgctcacgtctatgctgaaatgctcggcaaaaagatcgatgaacacggcgcagacgttttcttagtcaataccggatggaccgggggcggctacggcacaggcgaacgaatgaagctttcttacactagagcaatggtcaaagcagcgattgaaggcaaattagaggatgctgaaatgataactgacgatattttcggcctgcacattccggcccatgttcctggcgttcctgatcatatccttcagcctgaaaacacgtggaccaacaaggaagaatacaaagaaaaagcagtctaccttgcaaatgaattcaaagagaactttaaaaagttcgcacataccgatgccatcgcccaggcaggcggccctctcgtataaaaaacaaaagccaagagcaattatgctcttggcttgttttaattgacggaatgcaaagaagtcagcttgtatgtaatgatggtccggccttcttcccattgaagcttctgcacttcagctgtgcctgacttttcgccaaactttgttttgcgtacatccattggaatctccatcggatatactcggtatccgtccttctctaacgtgaatatattttcatctatgcgaacttcttttccttttgtcacaatcagtgtattaaattcaacaggcattcccaaagtgaaatcccctttcgttctcttttttctttatcataacatatttcactgtcagcggtttttcatccattgtgtgagctgccgcacgatacgccggttttcttttggcgggaaataatgtgtgaatgtactgtagtaccatgtttccaccggcttatgcagttgttttagcttctcttctaataaataggaatgctgaatcgaaacattttggtctttttctccatggattaacagcacgggagcctgaattttgtttacttggtcaaacggtgtcctccattgatattcctcaggcacctttttcggtgttccgccgatgactcttttcatcattcgccgcaaatcctgccgctcctcgtatgtaagaatcatatcactgacgcctccccaggaaacaaatgaagctgcctgcccgcccatttcgatcgcagtgagcattcccataattccgccgcgggaaaaaccgaagatatggattctatccttcttgacatttgggtgctgctgaagcaggcgaaaagcagaaaatgcatcctccctgtcttctccggcaaaatcctcattgccttctcctccttgattgcctctgtaaaaaggagcaaacaccacaaacccttgggatgcaaactggataatccggcccggccgaaccatgcccacgcttttaatcccgccgcgcaaatataaaaatccgtcatattgtcccggttccgccggctcagccagaagccccttaacccgtaatccatttgacagatagcagatcgtatacaaacgcacatgctggcttggcgacggaaatcttcttttctctacaatcaaaacagccgcctccttttttctatatgctttccttactccaaaattacatccggagaacctggttaggcattcacacatttttatacccatcatacgatatgtaaagcaaaaaaggatattaacttgatgcgaaataaggaggttgtctatgtgaacagatggttaaggctgggcttcgcctgtgtcggcagtatctttctgatgttcgccctggcggcttgcaagcaggaagaaacgctcaccaaagtcaaagtagctgaagtgacccattcaattttttacgcacctttatatgttgctgagtctaaaggtttttttaaggaagaagggcttgatgtcgatgtgaatacgacctggggcggagataaaacgatgacatcgcttctttccaacggctccgacatcgcgcttgtcgggtcagaaacatctatttatgtcgaagcgcaaggggctaaagatcccgtcattaatttcgcccagctgactcagacagacggaacgtttcttgtcgcgagagaagatgttgaacacttcgactgggatcagctgaaaggaaaaacgtttctcggtcagcgaaaaggcggcatgccgcaaatggtcggcgagtatgtactgaacaaacataagattgacccgcataaggatatagacctcatccagaacatagacttcgccaatattgccaatgcgtttgcttctggaaccggtgagtatgtacagctctttgaaccgcaggcttctctctttgagaaaaaaggcatcggccatatcgtggcttcattcggagaagaatcaggagaggttccttatacgacttttatggcgaaacaaagctatttgaagaaaaatgaagacacagccgtcaagtttacaaaagccatttataaggcgcagcagtgggttgaaaatcattctgcgaaggacatcacagatgccattaaagatgaatttgatgataccgacccagacgtcatcgaaacatccattgaacgctataaaaaacagcattcatattcaccagaccctctgcttaacgaaaaagaatgggagcttctccaaaccattatggataaatcgggagaactgccgaagcacattccatacaatcagcttgtaaataaagaaattgctgaaaaagtcacctcggagaaataggaggcgccatctatgtctttcttacatgtcgaccatgtaacccatacttatttttctattaaagaaaaaacaacggctgtgcgggatattcatttcgatgccgaaaaaggcgatttcatctcatttctcggcccaagcggctgcggaaaaacaacattgctttccattattgccggtttgattgagccatcagaaggcagagttctgattgaaggccgtgagccgaatcaaaaagaacataatattggctatatgcttcagcaggattacttatttccctggaaatctatcgaggaaaatgtgcttctcggtttaaaaatcgccgacacgctgacagaagaaagcaaagccgctgcactcggtctattgccggagttcggcctcatagatgtggagaaaaaatatccgaaagaactgtcaggcgggatgcgccagcgggctgcgcttgcaagaacacttgcgcctaaccctagtctgcttttgctggatgagccattttccgcgcttgattttcagacaaagctgtctttggaaaacctggtattccgcacattaaaggaatatcaaaaaacagcagtgcttgtcactcatgatataggggaagcgatagcgatgagcgatacgatctttttattttcaaatcagccgggcaccatccatcagatttttaccattcctaaggaattggccgcgatgttgccttttgacgcccgtcaggaaccttccttccagacactgtttcaaacgatatggaaggagctgaattctcttgagaaacagcaaagaaaccattgatctgcttcacgagcagtatcaattcaaacagaaaaaggaaaagtggaaggtccattcctttcagcttgccatatttattctctttttctcgggctgggaaatctccagcaggcagggctggatcgatccgctgatcttcagctctccatcagctgtgtggcgattattgctggagaaacttggtgacggttctttactgtcacacatcggcgtcactttatttgaaacggtgcttggctttttgctcgggacgtttatgggcacgtgcctagccgctttgttatggtggtctaaccgacttgccagaattttagatccgtatcttgtgattttgaacgcaatgccgaaagtggccctgggcccgatcctgattgtcgcgctcggtcccagttttatcagcatcattgcgatgggagccatcatcagcgtcattatcacaaccatcgttgtctacaccgccttccaagaggtcgacgaaaactatacgaaagtcatgaaaacattcggcgcaaaaaagtgggttatttttaaagaagtcatactgcctgcatcctcccccgcgattatttcaacactaaaagtgaacgtcggtttatcatgggttggcgttattgtaggggaattcctcgtttcgaaggtcggattaggatatatgattatttacggattccaagtcttcaattttacactcgtcttcttaagcctgctgatcatcgccatcttcgccactctgatgtatcagggcgtcgagctgctggaaaagaaatggacgaaggggaggacataaaaaacccggcacatgtgccgggttttttattcaatccatccagattctttcagttttttcaagctgatcggaagaacggaatccttcataataaagctgaattttttattgcgggaaaggttctccggcagctcgtgaaacaaaaccgggcctttcgtttcaaagtaatcagcctgcttttcaagcttttctatatctgcaaaatatatattttttacaatcactttttcttttccgagaactttatactgtccgagatacttgaggcttttgactctcgcgcccgtctcttcctttacttcccggagcgcagcctcttctgcgcactccatcggctctactttcccgcctggaaactcatagcctctgtcctcatgttctgttaaaagccatttgccgccaaaacggcaaatcacccagacatgcttcgggctgtccgagaaaggctgatcgtcaaaggaaagctgaacagtattctgataataatctttaaactcgtacatgtttatccctcaaatccgttcctagctatcttccatacatcataccacagttacgtttcttcggaagccttttatcaaaaaataagggaaacccagcacgccgtcaggttctgcatgcagactagctcgtacagtttttttgcgatacttttgccggaaagtgcgaccgacgctctgggctttattatgacccgcgaacagggaaaagttacggtttgcgcttaaatttattttttaacgtttctaaaagatcgacaagcatctgaggaaccggtatgccaagagagctggctgtcacaacaatttgcacagattcataaagaatataaaacataatagccaagtcacgaattgatccctgtgtattcagcagctgatcaaaaaagtggcatacagagatcagagccagcgtgactaattttttgacaagccgggcaaatacctttttaaatgacagtttgtgaataatggtttccttcaaagtcgtactgataaattcaattgccataagagagagcaaaatcagaaatgaatactgaaaacctccaaagaaaaaacccgctgctgaaacgctgactgctaaaaacgaaaagatgccaaagtctctatccatttatcccaacatcctttcacagaaacggccttacgatattctatggtaaacaagccgaacggattggatttttcagaaaaatggactggttgtcgcctatttttcagatacaaaaagaaaagccggacgtcttttttaagacatccggccgttctatttttgaacttaacctaggtaagcttttagcatccagttatgtttttcaatattttgatggatcgcaagaagcatgtcccctgttgtttcgtcaccgacttcatcagctaaatccatgccgtttttcagctcttccgcgatgactgtgaaatcatcatatacgctttgaaccatttgttcagctgtttcatttccagcagcttctttgacagaagccgtttctaaggattccttcattgttgcaatcggttttccgttcagcgccaaaagacgttctgctaagtcatcaatataagttgctgtttcgttgtacagctcctcaaacttttcatgaagagtgaagaaatctttccctttcacataccagtgataattatgtagtttcacatacatgaccgtccagttggctacttgtttgttcactgcttgaatcaattgttctgacatggtatctcctccttgttatatgactatgtatacccttaatatcgtacgctaaaacctcttttttacccttatctgtcacgatttcttctattatgctacaattgttaaaaaacgggaggtggaatgtcatgacgcttctcattacgataagtattttgattgtgctggctgttttgcttgtaaccatttggacgactgtaaaagcctataatgtaaagcataccattgatccaccacaagaaaatcactctgattcacacaatcaatgatgatgtgaatgctcctcttctgactgattgctggcagcatcggcgtctccgacttggacttttaaggtcggcatgctatgctgtttttttgctgtgacatgagattggacagtgtatacaccatcttccttaaacgtcgtttccaatcggtatacgcctttttcttgtttcaccttaaacatttggcttgcgtctttttccccttctttccatacttcaaactctacttcatcggcatccgtcacagcttcatcaccatatgatacagctgcttcataagcagcgctttctccgggatttactttttcaggcccggtcagcttgacatccaaaacctcgggcgtctcagctgtatttgctttactttcaccagatccgcatccattaagcaataaagcagaaaaaagcagaacaaccaacatctttttcatgccatcaccctttcatcgtttacctaaatagtagcaaacgcttacagcaaatggtacacaaaatatgagacgtcacaaaaaagacctttttgcttaagcgcaaaaaggtcctttctattttagccaaatacttttagcaattcttctttatcctgtgaaagccagaaacgcattaaacgtttagcgccttccagatcatgaagcttcgcttggccgcactgcttttcattcgcagcaggtatttctgtaatctctaccgcttccttcattgtgtcttcaagcagatcaacgatttccgctgatgtcggctctccgctcacaactagataatagcctgtctggcagcccattggagaaatatcaatgatatcaaaatgatcgtatttctcagcgtgagaacgaatcgtaaacgcgagcaaatgctcgagtgtgtgaatggtgtcaggcttcatcgcctgtttatttggctggcaaaaacgaatgtcaaatttatttacaacgccgtctgttcccactttatgcacgccgcaatgtcttacatatggagcaacaaccgcattatgatcaagctcaaaactttctactgaaggcataatggcactctccccttttttaaaaatgtaatttcattataacatacttttccgataagaattattgattaacttttcaatctgtgttttttttcttatacttgcatcagaaaggttgctgaagaaacatgaaaaccctattcatcgctctgatcagaggatatcaaaaattcatctcgcccctgacaccgccaacgtgccgcttttatccgacctgttcccaatatggaatcgaagcgattaaaacacatggcgctttaaaaggcggatggctgacaatcaaacggattttgaaatgccacccgttccatccgggaggagtcgatcccgttcctgaaaagaaacaaaaacattaattgttataaccgtttacgataagatccagttttccggttttaggatcaatgactaagccatggaccggaacgttttcagggaacagcgggtgatgtttaataacatctacgctgtctttcacactcgcttccactgaatcaaagcttttaaaccattgatcaaagtctacaccggagtactttattgtttcgatgcgttcttccggaatccctcttgctttgattttttcaagcatgcttttgctgctgattttgctcatgccgcaatcgtgatgcccgatcacacacacctcatctgcattcagctcgtacactgcgacgagtatacttctcatgatgcttccgaatgggtgtgtcacaagcgcaccggcacttttaatgattttcacatcaccgtttcgcaaattcatcgcatgcggcagcagttcaaccagacgagtatccatgcaagaaagaatcgccatttttttatctggaaattttgatgtttgatacttttcatactctctttgttcagtaaatgtcttgttaaattcgagaatatcatttagaagactcatgttcgttgtccctttctattctttttactcttcaatatatcacaacccttgtttattcgtcataataaaaaaagacaaaccctcaggcctgccttatttccccatgttatagcgttttttgaactgctcaactcgtccgcctttttcattgaatttctggcggcctgtataaaacggatgcgtgtcagagcttacctctactttaatgacaggatatgtgtttccgtcctcccactctgctgtttcattagatgttttcgtagaggtgcttagaaaacggtagccgctgttgacatcctgaaatatcactttgtggttctttggatgaattccttctttcatgggtatctcctttcaataaatcgtaataattacgttttattttataaccttacaaacgttttgtcaatcttcttatatccttccctctgtttcacatcgtaaacctcatggcatttaagaataggaagaataatctaaccgaggaagcaaataataaacccaaaatacatacagaacgtctttttggaaaggtggtttacgattgtggatgatttagttttggccagaagcctttttggcacgacgatgggctttcatatcattttcgcaacacttggagtcggtctgccgctcatgattttagtggcggaattgatctatcaaaaaacgaaagatgaccattatgcgatcatggcgaaaagatggacgaaagcacaagccgttttgctgggggtcgccataccgaccggaacgatcgcgggcactcagctcgcgcttttatggccgggatttatggaagtcatcggccgggtgatgtccctgccatttcaaattgaaatctatgctttttttgttgaagccctattcatgtcgatttatgtatacgctgcagaccgtttgtcacctgcaatgaggattgttgctgttttctttgtgttagtcggggcagcagcatccgctgttctgatcacgaatgttcacgcttttgaaggtacgcccgccggttttaaaattttaaacggaaaaattacagatgttgacccgtgggctgcgttttttaatcctagcttttttatcactgccggccatgtcgtgctgtccgcgtttatgactggtgcgtttatcgtggcttctgttgcggcgtataaaatgatccgaacgaggaaaaaggaaagggtctatcgctttcaccggaaagcccttttgctcgcactgacgatcggcggtattttttcattgctgaccgctttgaacggacacgaatctgcacagatgctgtacgaataccagcccgaaaaattagccggtgcggaaggcctatttgaaacaagatcccacgccccgctcgctatcggcggttttaccgacccgaatgaagaaaaagtaaaatgggcaatcgagattccatgggctttaagctttttggcagcgaaccgttttgacactgttgtaaaaggattaaatgcatttccgagagatgaatggccgccgcttttcattcacacgctgtttaatgcgatggttggtgtaggcatgctgctaattctttattccattatcggtgtggtctggagaaaggtgctcaagaaagaccgtttcccaacgtggcttttgatcattttcatgacagcaggcccttttagtctcatcggcattgaattcggctggattttcgcatgtacggggaggcagccttgggtcatctatcatctgctgaaaacgtcagatgtcgtaacaacgactggctcgatcggggtgctgttcttatttttcacatttgtttatgccgtgttaggcgcagctgtcgtctacgtgctgctgtattatttccgcaagcacccggttgacgaagatttaaatacagcggagtcgtaatggctccgcaaacaggaaaccaaatggaaggaagatcgtacaaatggagatttcaactgacgctctgatcgccatctcaattatctggggctttgtgtttatttacgccgtcatggcgacaatggattttggagcgggattttggtctatgatctatttaaacaaggagcatatgaaggccaccgatattgcgaatcgctttttgtccccgacttgggaggtcacaaacgtctttattgtggccatcgtcgtggcgcttttcagttttttccccggcgcgacatttgtgctcggcaccgttttattaattcccggaagcatgattttgctgcttttagcaattcgaagcggatttctcgtgttttcaaatacagcaaaggagcggaaaacgctaagatatatttccggcatctccggctttatcattcctgctattttaattttggtgcttcctgtgacacacggagggtttatagaaaaaacggatggaatctataacttaaatatgtctaaaatcttttcaagccccaacgcctattcatttatcgggtttgcgattttaagcaccttatttttgtcctcgctgttgcttgcagatttttcaaatgtggcagaggaacaggatgcgtaccgagcctacagaaaaagcgccctgattaccggcccgatttcactgttgtttgctgtatgcattatggtaactatgcggaatgaagcaaactggctgtacagcggaatgatgaatgatttttcttggattattgcatcgttcattacatttgtcattgctggaatcgctctttttctgcctaacaaaagctttggtcaaaacatcggaaaaccgcgtctcgcacttgttgcgattgggatacagtattttctcgcaagctacgcgtacgggcgggcgcatcttccgtatatgatttatcccgatgtgacagtcatgtcaggcttcacagagccagcaacgttcagagcgctgtttgcaacgtatatcgttgcatttatcattctatttccgggcttctttttcttctggaaaatgtttatgcgagataaacgctatatccgccaggaggaatagagggcaagccagccggctatactaatccagaacctttataaggaggggatggcatggagcagaaaattctatgtgaggtcaacaactgttcttattggggcaaaggtaacaaatgcaccgctgatgccatttatgttgtcagccatactggtgaaacggctgaaaacagccgggaaacagactgcaaaacgtttaagccgcatgatttataattaaaagaaagagctgcatcagccagctctttctttttgcatgttgagtgttctcagctttttagttatgaccccgtttgcaggtgaaaacaaaaaggcgcttgcataacatacacctgtcatggccgccatcgctcctgaaatcgaaacattaagccacgttgcgaagaaatagcccatgaccgccgacagcccgccaatcaacgcgctgagaatcagcatataaagaagccggtctgtcagcaaatgtgccgcagccggcggaacaatcagcatggccacaaccaatacggcacccaccgaatcaaaggaagcaacagtcgtcaaggacagcatgcccatttgcacgtaatgaatgagcaaaaccggtattcccaaggctaaagccatttgaggatcaaacgaagcgattttaaactccttatagcacacactgatcaacactacgtttaaaaccagaacagatgccagcatccaaaacgctttcggcccaatatcaaccccgaataccgtcaccgtattccacggcacaaaagcgatttctcccattaacgagtgctcaatatcgagatggacattcgctccatacacagaaagcaaaataaccccgattgcaaataaggatgtaaacacaactcctatggcagcatctgattgaacccccttgctatgaagaagctgaaccaagaaagccgttaacagaccggttgcggctgcgccaataaacatataaatcccatcgagacttcccgtcactagaaaagcgccgacaatgccaagcaacactgtgtgactgattgcgtcggccagcatcgccatgcttctcagcacaagaaatgtgccgatcaatccgcagcttacaccgactaatacaccggtagctataatccatgcttcaaaactcatttgcgatctgtcccttctcggcatcatgagacgcttttcgacgctcaggcatccgtccatacagctttaagagtgaataaagccgctctctcgtttctctcggtaaacggtccgggtcaaagtagtcctgatcggattctatattggcaagttccatttcatgcatgagatacacttcatacatccgctgcttcaaagctgtgtgatagcctttttctatccctttgcttgtgatttgccaaatcccattttcgatacgctcaatgcacctctcttgttccaagtcatttaatgccttaaggcataatgaaggggataggcgtcttttctttcttacactttcaacagttacacaaagattattcttttcatactgttcataaatcgccaaaagcacttgctccctgcttgttctgcgccgcagcctcatcagccttatggctttagcagccaatccccgcttaggcgcgcaaatcattgaaaaaagaaagagcagcgttgcagataagatcattaatggccctgtcgccattcccttcatcgtggtgctaagcagggttccggccactccgctgaccccgcctgtaatcccggcaatgatgatcatcccggttaatcgttcggtccaatatctcgcggttatggcaggtgtaatcagcatagccgccattaatatcacaccaacagtctgaagcccaatgacgacagcacagacaatcagacaagccaaaagcccgtttaaaaaacgcaccgggattcctaatccctttgcaaacgcgagatcaaaagtaatcaatgtaaattccttaaagaaaacaatacataggagcagtagaacagcggatatccctgcaataaggatgatatcctgcctgaccaatgaagcagcctggccgaataaaaaagaatcaagcccgctttggcttcccgccccctgttgctgaatatatgtcagcagaatgatcccgacgccaaaaaacacagaaagaacaatcccgatcgccgagtcctcctttgtttttgaaagccgaggaatcagctgaatacaaaacgttccgagcagtccggcgagcgctgcccccagcaaaaagaaaggcagtgatttttgcccggtgaacagaaaagcgagacacactcccggcagagctgaatgggccatcgcatcgccgattaaactttgctttctcagcagcacaaagctgcccaaaacaccgcttgccgtcccgagcaaaagcgtaccggccagcacccactgtgtattcggatgctgaagctgcagccacaaactttcaaacattgcgctcactccttatgtccttctgccagcactttatcttttaaaaacgtaagccttcctccatatgttttttgcaggttttcgatcgtaaaaacgttttccgtcggtccgaaagcgattttccttaaatgaagcagtaagatccaatcgaaataatcctcggcggtctgcagatcatgatggacgacaagcacggtttttcctttttctttgagttctgccaacagcgtcataatcgcgcgctccgtcgctgcatcaacacctgcaaacggttcatccataaaataaatgtcagcgttctggcagagtgcccgggcaagaaacacccgctgctgctgtccgcctgacagctggctgatttgccttttcgcataatcatgcatcccgacttttgttaatgcggccttcgccatctccacatccgctttctttggcctctttaataaaccgattctcccgtatcttcccattaggacgacatcgagcgggcttgtggggaaatcccagtcaaccgagccgcgctgcggaacatatccgattctggtccgctgatccttatagtctttgccgtaaatagagatgtctccggaagctctgggcacaagaccgagaatcgttttgatcaaggttgattttcccgcgccgtttgggccgataatgccaataagttttccttcaggcacctgcagcgaaatgtcctgcagtacaggctttttatgataagcaaccgtcacattatcaagctcaacagggaacatatcctccacctcttttctttatttaagcgctttagtaatcgtgttgatattgtggcggaacattccttcgtatgtgccttcttttgtgcccttttcacccatggcatccgaataaagctgaccgccgattgtgactgtatggcctttttctttagcgccttccaccactgcattgattgatttttcagatacactgctttctacgaacacagcttttatttgtttttctgtcagaagatcaaccagctcctgaacatcccttaatccatagtccgaatctgtgctgagtccctgcaggccttttaccttaaatccatactcattcccaaagtacgcaaacgcatcatgagcagtcacaagcacacggcttttctccggaatatgtgcgatctccttacgcgaccacttatctaaatattgcaaatcttctttgtactctttggcatttttccgaaaggcatctgcgtgctgaggcattgctttgctgaattgcgcttcaatttcatccaccgcatagatccataacggaatgctgaaccagacgtggggatcaaacgtcttgccttcccccgcgggaataagcttatttttcggaatggcctcagctactgccgccgattgtttttgttcgccgattttttggaggacatcctccattttcccttccaaatgcaacccgctgtacagaacaacatcggcagacattaattttttcgtgtcaccttgggaagctttgtaaaggtgcggatcaacccccggtcccattaaagaggtgacttttacgtgcttacctccgatgttttctgctgcatcggcaatttgagatgttgtcgctgtcacttgtaattgctgatcagcgctttttccggctgaatccgttccgcatcccgttaaagcaaaggtcgcaaaaagtactgctgccatcagcccttgtctcatatttctcctcctctttgccatcaatgtccgattgttttatcttatgttgtcagttcttagacatgtgacattaaattagccaaaagcatgttttatttacacaggacaaaaagtttccctcatgcaaaattatcgcgtttggccatttttgtcaagctgatttacataaaaaaaccggctgggtcagcagccggtccaaacgagaagggatgtattcaacgaacacttttactgtaacagcacagtgtcatttattcaaaatagcaaaatgcttttttcttaaccatgctgtgtgaaaacatccattttggtcacatattttcgcataatatcttggtttacctcaacccctaaaccaggctgttttgacacagaaataaatccattatcaatacgaatatcaggagttacaatatcttcatcccaatagcgtgaggatgaagatatatcgccaggtattgtgaattgaggcagtgaagcaagcgccacgttctgcgctcttgatatgcctgtttccagcattcctccgcaccaaacctgcatatgatgctctttgcataaatcatgaatttttaaggcttctgttaagccgccgacacgagaaggttttatattaataattttgcagcttcctagctcaatcgcccgtctcgcatcatcaactgaacaaatgctctcatcaaggcaaatggccgttttcaaatgtttctgcaagtggcggtggtcaacgatatcgtcagcttggagcggctgctcaatcatcattaaatgatagtcatcaagctcctttaaacggctgatatccttcagttcgtaagaggaattggcatcggccataagcgggatggttgggaatcggctgcggatggccttgaccaattccacatcctgcccaggctgaattttaatttttattctttgataaccttctttttgatagctctcaatttccttcagcatatcgtcaagaggcgccaggccgactaccaccccggcagggactttatctcttgttccgcccaatgcctcagcaagggatacgcccttctttttggcataaatatcccatacagccgattcaagtcccgcttttgccatccggtttcctttataccgcgccaggctgtccggcacttctgaagggtgattgaattcacggccgacgacatttgggataaaaaaatcttttagcatatgcaaacatgttccaatggtttcctcggtgtaccaaggcgaagagaaagcggaaacttctccccagcctgtgacacctgatgtatcaatggcttccacgatcagaaatttacgctcttgaagcgtttcgatactgtttttaaacggtttctttaagttcatgctcaaatggtaaagcgtgattttttctatttcgatcatagcagttctcctttacgcgcatccttcagctgatttcgcaagagcttattagacgcattgcgcggcaggcggtcaagcacaaagaattttgccggaattttatacttcgccaagcgttctttgcagtagtcagtcaattctcctgcgctcacaggcttgtgaaggacaagataggcgtgaggcactttcccccattttttgtcctcagcccctgaaaccccggcttcggccacagcggggtgtgaaagcagcactgactccacttcggccggataaatgttttctccgccggatatgatcagatctgaacgtctgtctaatacatataaaaagccttcattgtccaaataaccaagatcacctgttttcagccagccattttgaaaggaggcttcgtttgcgctctcccggttaaaatagcttttcatgacattcgggcctttgaccatgatttcaccgtgttcatacggttcacatacctgtccgtcccgctctattttgatttcacacgaaaacagcggtttccccgcagatccgagcttttccatgctgaattccggcgacagggtaacaatttgcgagcatgtttctgtcattccatatgactgaaagacagggaatcctttctcacggcattcctcaagcaatggcagcggtgcaggaccgccgccgagaagaatgcatctgatggattcagggcagcggtttgtttcttccaaaagactggccagcatagtctgcaccgcagatatcattgtcacttcatgcctgttgatagaatgcagcacatcgcttacggaaaaacgctggtgaagcacgacagtcattccatagatcacagatttaaataatgcggacaatccgctgatatgaaagagcggcaatgcgataagccagcggtcttgttctgttatacccaaattaagagcggacgacaccgcactgaaataatggtttccgaacgtttgctgaactcccttgggctttcctgtcgtacccgacgtatacatcagcgttgccgttgcatccatttgcatataagcctcgatctcaatttcctctgctgcttctttcatcagttcatccacatcaatcgtttgaacgatgtgttcatattctttcttctcaaagcttgaatctgtcaataaaaagccggatcccgaatcctccagctgaaacagcctttcatgtgttgacagcttcgtattcaaaagcaccgccttaacaccaagcaaaaaacaagcgtgaacagcgtataccatttctgcacggttttggagcaaaatagctgcagtatcccctttccgaaccgaatgagcggcaagctgttccgccattcgtttagacgcggcaaacaattctgcaaatgtcacggtttggtcttcatagatgagagcgattctctcaggtgtcagctgtgcccgctgcatgagccagttgggctgttctgtcagcatgtcatcatctccgaggtaaaatgtctgtattgaaaagaaaacagcttggaccgcaaagtctcaagctgttggtttactagatattgctgatcacggaaaacgagggaactgtccgaaatcaggtttgcgtttttccttaaaggaatcacggccttcttttgcttcatctgttgtgtagtaaagaagggtagcatcccctgcaaactgctgaattccagcaagtccgtctgtgtccgcgttaaacgcagctttaagaaagcgcagtgcggtcgggcttttttcaagcatttcttcacaccatttaatcgtttcttcttcaagctgttccaaaggaacgactgtgttgacaagacccatgtccagtgcttcctgtgcgttgtactgacggcataggtaccagatttcacgtgcttttttatgtcctacaattcgagccaggtagccagaaccgtaacctgcatcgaagcttcccactttagggcctgtttgtccaaaaattgcgttgtccgcagcaattgtcaagtcacatacgatgtgaagcacatggcctccgccgatcgcatatccggacaccatcgcaacaaccggtttcgggatgacgcggattaaacgctgaagatccaatacgttaagacgagggatctggtcgtctcctacatatccaccgtggccgcgcactttttggtctccgccagaacaaaatgctttgtcccctgcaccggcaagcacgataaccccaacgttttggtcgtctcttgcgtcagcaaacgcatcaatcatttcagcaaccgttttaggggtaaacgcattatgtacctcaggtcggttgattgttatttttgcaatgccattatacgtttcatacaatatctcatcgtatgtccgttttgttttccattcagccatatgatgacctccttttattctctatgtgaatgagtcagatgcttgtcaaaaactcactcactattttaccaaacaatcgcggctgctccacatggaccgtatgtcctgcttttggaacaatctctattctactagaaggaagcatcttatgcacctcttgattgatggcgcaaaatttttcgtcccactccccgcagatcagaagcacaggaacatctatttcctctacacggctccacaaggaaggctgtgaaccggtgcccatgccggttaaactgttcgcaagcccaatcttattgttccgcagacggcccgatcgtatcctgtaccgaatatcttcagccagcctctgctgagatgaaaacaaagggatattctcccaatacgcaacaaacgcttcgagcccgtctcgtaaaataaaatcagcaagcttccggtcccgcatgattcgttcccgccgttccccaagtgttttgagccccggcgtcgtgctttcaagcacaagtgccgatacccgctcgggatatgtcatcgcaaaagagtaagcaagccttcctcccatagaatacccaatcaatttcactttgtgaagttttaattgatcaaaaatctcggcaaggtcagaaacttgccgggttgtgctgtatcttttcccattcagcggggcatcggtttccccatgccctaaacaatcaattttgatcaaacgggaatcaggcagcatttcatcaagaaaagtccatgattgtttgctgccggtaaacccatgcagacagacgacggcttcggaagcattcggtccctcgtctgccactgcatatcggacaccatctgataccgttatgtttacagttcccattgttttttcacttcccgcacagcctcattcagcatatcgcgatgaagctggactcttgattggcgatccgttttgatttcaatcaaatggagtccgggcttgtctgcctgcggcgcgtaagctgttttgaattcatcccaagaagccgggcatgaatacgttccgccgtaaagtgcagccgcatgcttgaaatcgagccctgtcggtgtgccgaacaaatcttcaaagtgtgtcttctcagaagcctgcggcaaaaaggagaaaatccctcctccgtcattattgacaagaatcacagtaagaggaatacccagctttttggccgccagcaggccgtttaaatcatgataaaaagataaatctccaatcacaagggtaacaggcgcttttgttccttcacatacccccatggcagaggagacgacaccgtctatcccgtttgctccccggtttgaataaatccggaaagggcggtcctgcttttcaaaaaacgtatcaacatccctgatcggcatgctgtttcccacaaacagcgagctgttttcaggcacaagatgctgaaggattcgatagagattgccttcaaacgaaacatcttcactgctgattgtttgcagatgctcgcggaaccgcccattgacaaactgccacttttccagccactctgaggatctggtggcagcagtaaggcctgccatgatctcctcagcaaaaacagacgcattacaatgaatcatatgcgcgcttgcctgtgtcgggtctctccaccctccatcctcgtcaatcacgatttgctgaatcgtcggatcatccttaagccataagaaaaccggttttgaaacaggcatcggtccaaaccgaatgacaacatcaggacggagtttccgcttcagctcatcatcttttaaaaacgaatcatacgcatcaataacagtgcttttatcatgaacaccattccgcagattagacagcggatctgctaaaattggatactgaagcgcttttgacagcgcaataatgttttccttgtccgcatcactatggagctctccgcagacgatcattcctttttcagcctctgcgagcatctcagccacatcagacagggactctcggtcaacagactgcgtacccgttttcacagacacatgacggcctgttctcattcttccaaacggctcatctgaaagatccggcatcagcggttcgcgcagcggcacattcacatggacaggccccatcgggcgcttttgtgcttctccggcagcgcggcttgccagcgttcggatgtatctcagcatttgcggagactcttcaggaagagcagagtctgtgaaaaacttaacaaagttaccgaataagaagtgctgattaatagcctgcggtgcgcctacttcgcgcagctcatgaggccgatcagcagttaacacaataataggcacccttgaataatgggcttcaaccacagccggataaaagttggccgcggctgttccagatgtacagatcaatagtacgggacgctgcttcgcttttgccaaacctaatgcaaaaaatccggcagacctttcatcaatttggacatggacgctgatatcgggatgcgcagcacaaagaacagccagcggtgtagatcttgagcccggacaaacgacggcgtccgtaattccggaaagggcgaattcatcaataaaacttccgatgtaatgagtaatcgggttgactgtcaacgcctctcacctcctaatgcagagatcatcggcttcaatttaatctgtgtttcttcatattccgagattggttccgagtcttccacaataccgcacccggcaaacagccttgctgtgcttccttcgatgagccctgaacgaatggcgaccgcgaattccccgttatcctggctgtcaatccagccgataggggccgcataccagccgcgggacatcggttcaatctccctgatcacgtcaacagctttttcctgaggtgatcccccaagcgcgggagtggggtgcagcttctcaattaagtcaaaaatcgaagcagactcgcgcagctgtccgacaatcggcgtaaacaggtgctgaacgctttttgttttgtacaaaacaggtccatcaggcttttcaacctctgaacagcttgatacaaaagcattatgaatcatacctaccacaatatcatgctcaagcaggtttttctcatcgtttaataattcaaggcctatccggcggtcgtcttcttcattcacgcctcgtttaatggagcctgccagacaggaagacatgacagtgccgccgtctcttttgatcagtctttccggagacgcgccgacaaaggttttgccttcttgttcaattgcaaaaacatagcttgtctgctgatcgtccagaagcgttttaagcaccggttcaatttggattggaccgtcaaacgtgagcagcagctctcgggcaagaacaaccttatcatattgtttctctttaatttggcttgtggccgtttcgattgctttcagccaatcatccttatccagctcttcggctgctgcaatcacagcctgatcttcttgcttgaaatcgggaaccataaattccgccgcaaaagcttttaagccttctaaaacagcttctgcgtcttctcctccgcttacccatctgttaactgttaagaacgggccttcagcagtcatcgtcagcataagcgcaggcacaaagaaatccccttccgagaaatggtcccattgtgaacctctttcttcgcaagggtcaaaagaaaatcctccgaataacacaggtcccactgcagaatgctgcagcttttcttcttcataaatatgaaaagccgtctttttaaagcgctcccattgttcaaaaacctcacgataccgctcgctgtttttttgatttgtctggaaaaccgcttctttgccaagaccgactattgtcaattcactttcaggatctgaccaaaaaaatcgattgcctgtatatttttttgctccgtaattgaaaaatgatagagggtcaagagactcgatttgtctcgaatagcttattaagacagcatggttgacttctttggctttatgtaatgcatgtagaacttcctttcggaacgtacgctgcaccgttgtcaccatgagacattcctccataatccttaaaatgcttttaataccatacacctgtgtctcctttgtgtcaaacacagatcatgcagtccaaatggcctgccttacctattataaacctaatttcagaaatgaaaaagaaacaaagcttaaatttctttctccactgatagcaaaggttgtatccgcttaccataaaaggaaaacctcctatattcctccacccgccatttatgaaagttctcaggcgatctgttcatactaaaggtatgcatcacagagaaacgaggcgatcacattgcttacgaaagaacagcttcagcatttaaaaaatgaactggaacaaacgaaaaaagatatcttaaaccgtttcaaagacaatgatcattttcagcttaactcagcctttccttatgattcgtggggtgagctttcggcatacgacaaccatcccggcgatcaggcgacagaactttacgagcgtgagaaagacatcgctctagacttgcatgagagagagcaccttcgggacattgagcattcattgaaggcgatagaaaacggtacgtatggcatttgtgaagtcagcggaaaggaaatccctttcgaacgacttgaagcgcttccgactgccacaaccctcgcggagtattcgtcacaggacgtggtttccaaagaccgtccgattgaagaagaaacaccattcgggcaatttgaatttgatgatgatgaagaaatcagagcgccatatgacagtgaggattcctatcaggatgtcgaaaaatatgggaactcacaaacgccgcaggatatggaaaaccctccgctcagctatgatgatatgacgatgaatgccgaagagaatatcggcaatacggagtcttacgaaaatttcatcgctacagatatcactgggaaagaaattaccgtttatcaaagcagagcccatgagcgctatgaagaagaacttgacgaagagggaatcatgaccacattcggcgatctccacgctgattgaacccccaattattgggggttcttttccgttttcagcatatcgtaaatcagcttcagataatccttttgcaggccgatgtcataccgctcgccctctagcaatttcccgtatacggtacatgccccgagcgaagcttttatcgcatccgttacctgcacttctcctccgctatcagcttctaatgcctccagctcattaaaaatatccggtgtgaaaatataacgccctgctgcggcaaaatgagacggagggttttgtttaggcttttccacaatatcctgtatgcgataaagccctttttcaacaggctccccttttatcaccccgtaatgatgtaaatcctccgtttttgtttcttttaagccgatcacactggactgatatttcgtatacgcttcaatcagctgccccaaagccggctgattggcggaaaaaatcagatcatctggcaaaacgacggcaaaaggctctcctcctgcaaattgctttccgaaagaaatggcgtcgccaagaccctttgcataaggctgccgcacatagtgaatccgtatatccggaatgggatgctctctaagtaaatgcagtttattcttagaggccaaaaaagcctcaagtgccaaagaggaatcaaaatagtcgacaatcagatttttatggctcgatacaaccatcaaaatgtcctcaatgcctgactcctttaattcttcaacaagataatgaatcacaggcttagatcctaccggaaacatttctttcggaatcaccttcgtcaccggcagatttctcgtgccgaatccgcctgcaggaatgatcgctttttttatcatggtattttcccctcagctcatgtttattacatgatattccaagagcgcatcccgatgtttgtacatctgaaattaggcggaagcaactgggcagaaagcggaatcacgaaccagcccttttttaataggatattgatatatgaccagtaatcttgtaaaggagctcaggtgatgaaaatttgtgtggttggcgccgggtatgtcggtttaaccctatcagcggcactggcatccatcggacatgacatgatatgcacagacaaagacgtcaaaaaaatcgggcagctgaaaaaaggagtcattcccttttacgagcctgggctttcagatgcaatacttcgttgcggcaatctctcgttttcttctgaagtgaaatcgagcatggaggaatgtcccgttatttttatcgcagtcggaactccgccgcgttcggacggatcagctgatacgaaagccctgcagtccgtcatcggtgatttaagcgaggcgatccgatcgtataaaaccattattacgaaaagcactgttccgcccgggacaaatgaaaacatagcaaaacagctgattgcctccggagtgtctaaaaacctctttaatatcgtatccaatccggagtttctgcgggaaggcaatgccttatatgacatgctgcatcctgacaaaacagtcatcggtgttcaggaagaagatcacgtatcggcagccatcgtcaaatccatttacaaacacattgataccccttttatcgttacaagcttagcgggagcagagctgatcaaatatgccaacaatttctttttagcggccaaaatttcgttcattaacgaaatggcccgcatatgtgaagcctatcaatcagatatctcagatatttcccgcgctatcggtctagacccaaggatcgggaagcactttttgcaggcaggcatcggatacggaggctcttgttttccaaaggatctgcaggcgctgcaatttgctgcccaggaaaaaaacacggagaccttcctgctccgggccgtgcagcacattaatgacacccagcttggcctgtatatcaaaaaaatacagtcattcttcgaaacacttcaaggcaagaaagcggctgtactcggcatttccttcaaaccgaatactgatgacatccggaattctcaggctgtcagactgatggaaaggctggcggagctgggatgtgatgttcatgcatatgatcctgaagctgtacttccagaacatttgcggcaacatgtaactcagcattctcaagcttttgatgcgatcgaagagagtgactttttatttttggcgacagaatggtctgagtttttagcgtttgattggaaaaaggctgcagatatcatgaaagggcgtcttgtgattgacggacgcaacgtactaaaaaaagaactgatcgaggcttgcggcctgatctgtacgggagttggccgtccatgaaaatactcgtcacaggagcagcgggctttatcggctcccacctctgcgaagaattactaaaagataagaaacataacgttatcggaatcgatgactttatcggtcctactccattttccttgaaattaaaaaaccttaaaaacctgctgccggaaaagcgatttacgttcataaaggaaaatctgctgacagccgatcttgcttccttactggaaggagtggacgtcatctttcatttggcggccataccgggtgtccgctcaagctggggcaatcattttcacccatatgccgcacataatatccaagcgctccaaaggctcctcgaggcgtgccgggaacattctattcaaacgttcgtctttgcatccacctcttccgtctatggcgaaaaacaaggaaaagtcagcgaaaacacgtcgctttctcctttatctccgtacggggtaacaaagcttacgggagaaaagctttgccatgtgtataaacagagctttggcattccaattgtgattctccgtttttttaccgtatacgggccaagacagcggccggatatggcttttcaccggctcattaagcagcaccttcagcaaaagccgcttaccatcttcggtgatgggcagcagtcaagagatttcacttatatcagcgactgtgtcaaaggcatcaccgctgttcttgggaaaccccaccttattggtgaaacagtaaatatcggcggcgcagagcgtgcctcagtcttaaaagttgtctccctcattgaggatatttccgggagaaaagcaacactgcacttttcggacaaaatagcaggggaaccgagcaacacgtgggcggatatttcaaaagcaaaacagctcttgcattatgatcccgccacatccttaaaggatggcttgaccaacgaaatcgcctatttatcgtcgctgtatcagggggaataaaaatgaagcttgcctttatctgtacagaaaagctgccggcgcccgcagtacgcggcggcgctattcaaatgatgattgacggtgtcacgccctatttcagcagcaggtacgacctgaccattttttcaatagaagatccatcgctcccaaaaagagaaacaaaagacggcgtacattatatccatctgccaaaagaacattaccgcgaggcggtagccgaagagctgcgagcctcttcctttgacctcattcatgtgttcaacaggcctttaaatgtctctttatataaaaaagcctcaccaaacagcaagatcgttctgagcctgcataacgaaatgttttctgaaaaaaagatgaccttcgcgcaaggaaaagaagtactcgacaatgtctccatgatcacaacagtgagcgaatttattaaacaaaccgtcattgaacgtttccctgaagccgaggacatcacaaaagttgtgtattccggcgttgatttaaactcttatccgcccgtctggacgatgaaaggctcggctgtcagaaaaacataccggaaaaaatacggtattgaagataaaaaagttattttattcgccggccgcttaagcccgacaaaagggcctcaccttctcattcacagcatgagacggattttgcagcagcaccctgatgctgtactggtcatagcaggcgggaagtggttcagcgatgacagcgaaaaccaatatgtcacctatctgcgcacgctggcgctgccatacagagaccacataatctttacaaaattcattcccgcagacgatatcccaaacctttttctgatggcagatgtatttgtgtgcagctctcagtggaacgaacccctcgcccgtgtgaattatgaagcaatggcggccggcacgcccttaattaccacaaaccggggcggaaacggtgaagtcgtaaaacacgaagtcaccggccttgtcatcgatagctacaacaaaccttcttcatttgcaaaagcaattgacagagcctttacagatcaagaattaatgaacaaaatgacaaaaaacgcccgaaagcatgtagaagctttatttacctttacccatgctgccaaaaggctcaatactgtttaccaatccgttctgaccccgaaaaacaaacaatttccgccgccttttctgacgcaaaattttgatttatcatctatcaatcagctttttgtgaaagcaaaaacataaaacctacagctcgtgttgcaaaacgggctgttttttcgctacagagaacttaaaaaaaggcataaatgtgactttatgccttgcgctttacagtttgagaaaaccatggagctggtttagattcacttggaagaatgatgatttccactttagcttcttccgctaagtctggttcttcatcttcatcctcttcttcatatgggggcgctgagcgtttcgaatcacgctcctcctcaggctccagagtggtttcgaattttgtttcttcttcatcatcgacgattttgcgatctgtttccttttccttcgtttctttttgatattctttcggtgcattgatgtgagggagctctcgaatgctgcccacatctaaatgcttctcctcttcttccttctcagctgagattgagtcatgagcctgccatcccatcggtccaggcggtgtaaatacgaattggtcgagatccagtttagaaatagaggctttttgtctcgatgacctcatgtcaattcgcctcccgatacgcttttatctttttatacagttccggcagtttatccaaaaacgaatctttagattcttcaacagaaatcatgttttgcagcgcccagttatacttctcatctgaccacgttttcttttgcttcaaataatatttgtgcccgattgcacagaacaaatgcggaaacgcgagatcaatccaaagtacctcgtactgtttttctgtgagcggatacactgcgtcgtaggccgcaagcagtgcaaccatgaaatcagtatcccatacagaaagcttaaccatcactttattcagcagaatacgaaggtctcttgacggcaaatcgtaggtaatcgagtgaagctcctttaaaaaaggctccccttcgatctcagtcaaacgtgccaatgtaaaatcctgaaaacagaatccgccatgctcgagtgtctcttttgtccaggtttcgtattctgagtcatcaagcgctctgagagcttcttttcctcttgccagcattttatcagcatgttttaagaaagtttgcgaaaatacgtcatcaggataggatgctgcgatctgcatattcccttcaagttcctgcagcttccaacggtacaatttgtgccattttcccagcctgcttctcttcttgctttcatctgtgcaaacatatccttttgaggcatgatgaaaatggccggcaaatgacatgacttttttcatttgctctgcatcatagtaaatcatttcttttcctgtcactttgtcatataaactgtaagaaacctgatccgtgcccaagcagctaccgccattttttgtttgatgaatcggcgctatcggcagccctttctcttgtaaatgggcgtgtgcctgagtgataaaaagcatccgctccggtttcatttgcgcttcttttagcagctttgggccatgatcagtttcgacttcccagattttgcgcccgcttttgttcgatttcagcgccacatggtcgatatgaaacggataataactgagaatttcggacacaatctgttcttcatgctctttttggtacactctgttcaccccttctatctgttcttttcatagacgctgagcagattttcagccaccctctgccagccaaaattgctttctgcctcacggcggctgtatttcccaagccgttcccgcttttccgagctgctcagcaaatcattgatacgttcggcatattgtttaggattttcaaagtcatgaatgatgtagccgtttttcccttcctctatgacctctggattgcctccccgattgcttgtaataataggaagtcccgcagccatcgcttcataatgcacccttgctaaaggctcctgccattgcgaagagcatacaaatacatctgacatggtataaaggcgcggaatgtcctttggcttcacaaattgaataaatgtgacatgatccttttgcatcgcaccaagggtatgaagatgtttgacatagttatttaattcattatctccgaaccattttgacccgataaacaccatcatgacatcggggtgctcctcaatgatgtccggcaaagcctgcaataatatgtgcgggcctttgactttgctaagccggccgacaaacaagacgatttttttgccgtgaagccccagctcgcttcgcatctcttcgcgagctcgctgcccttcattcgtccagcgagggtggtacgtttttaaatccacaccagaatacaccgtttttgtttttgatcgtgctgacggaaaacggcttgtgatcgtctgtccgatataatcgctgaccgtaacaatctgcgctacggagtcgatgcaaatctcgccttccgcctggctgattttatcgtaagcgaacatttcattgtgaacgcttaaaataaaaacagcatccggcgcctgtttcttcaatttcggaacccagcttgggcgattacaaacatgcacaagatcaaaacggctctttttcagctctgctccaacggcttcttcataacggtcttcatccaaatgcacataatggacaccgtctaccttctctctatcagcgagattcggatctttaatagaaaacacagtcacctcatgtttttttgcaattaaaggggcaaccgcttcgaggtagatttgaatggcgcctcctcgaaccgatgggacaggaagcttctctgtggcgatcagtgctattttcatacatagcctccattcctgcatgatttttaactagttagaatcatgatacggctgaacaaccaacttgtgcggaatgggactgccctaaaaacaaaacgggtaaacaaccagattcatctattaaatatagtcaaataactcaatcattttttccttttgattcataaggtaggagtaaaacaggtaaggatgtgtcctttaatggcagaaaaccatgaagtcattgaggaggggaattcatcagagcttcctttatcagcagaagatgcaaaaaaattaacggagctggctgaaaatgtgcttcaaggatgggatgtgcaggctgaaaaaatagacgtcattcagggaaaccagatggcgcttgtctggaaggtccacacagactccggcgcggtttgtctaaaacgaatacacaggccagaaaagaaagcgttgttttccattttcgcgcaggactatttagcaaaaaaaggcatgaatgttcctggcatactcccaaacaaaaaaggcagcctatattctaagcacggctcatttctatttgtcgtatatgactggatcgaaggaagaccgtttgagctgactgtaaagcaggacttggagtttatcatgaaaggccttgctgattttcatacagcttccgtcggatatcagccgccaaatggcgttcccatatttaccaaattaggtcgctggccgaatcactacacgaaacgatgcaaacagatggaaacgtggaagctgatggcggaggcggaaaaagaagatcctttctcacagctttatcttcaggagatagatggctttattgaagacgggctgcgcatcaaagaccggcttttgcaatcgacctatgttccatggactgaacagctgaaaaaaagccctaacctttgccaccaggattacggaaccgggaatacactcttaggagaaaatgaacagatttgggtcatcgacttagataccgtatcatttgatctgcctattcgcgatttgcgcaaaatgattattccgcttttggatacgacgggtgtttgggatgacgaaacatttaatgtcatgctgaacgcatacgaatccagagccccattaactgaagaacaaaaacaagtcatgtttattgatatgctgtttccttacgagctttacgatgtcattcgcgaaaaatacgtccgcaagtctgctttaccgaaggaagaattagaatcagcttttgaatatgaacgcattaaagcaaacgcattgcggcagcttatttaagaccatcatttcccccgcatatcgggggtttgatatttataagataaagggtaattaaatacatgcggaggttgcaaatatgaaaaagattgtcggcgctttagccgtttttgtgattacatatgcgctgttttcagccgcaggctacctgtttcctgtggaccaagaatggtacaattcattgaaaaaaccggactggacgccaagcggaactgcgatcggcatcatttgggccatcctgtttgccctgatctccctttcagcagccattgtatatgctgcgttttcatttaaaggtgcgaaaagcttttggtttacacttttgataaattacgtgctcaatcaagccttcagctatttccagtttacgcaaaaaaatctgctggctgcatcgcttgactgcctgcttgtcgccatcacagcaatcgtattactgatcattgccaaaaaatacagcagagccgcaagctatcttcttttgccttattttttatggagtgcatttgcgacgttcttatcctttacaatcaattcaatgaatctgtgaacaaaaaaagccgcttatacagcggctttttcacatcatcggcttgatgccccaaatgtccttcgcatattcccggatcgtgcggtcgctggagaaatatccagaatgagcaatgtttacaatcgaatgctcagaccatttccttcgctctcgataatcagcttgaattcgctcctgtgcatctgcatatgagctgaaatccttcagcacaaaatactcatcattatgcggaagcagcgagtcaaagatcgattcaaattcatctgcctctccttcaaaaaaaccattgatcaactgatccgctacctgcctgattctcctgtcatgctgataatattccctcgacctatagccgccgttttcctgatacgatagaacctcatccgcctttaagccgaacgtgtaaatacagtcagggcccacccgctcaaggatctcgatatttgcgccgtcatgcgtgccgatcgtcaaagccccgttcatcataaacttcatattccctgtaccagacgcttccttgcttgcggttgaaatttgctcacttacgtctgatgccggaaaaattcgctcagccatagaaactctataattttctaaaaaaacaactttgatcagctgtttgaccgccggatcataattgactttttctgcgacagaatggatcagcttaatgattttcttggcataataatagcttggtgaagcctttgccccgaaaataaaggtttgcgggtagattgaaaaccccgaatcctccttgaggcggttatacaaatacataatgtgaagaacattcagcagctgccgtttatatgcatgaagccgtttcacctgtacgtcgaatatgctctcagggttcacaaccaccccggccgtgcaaaaaatcaaatcggcaagctcttgttttttcttgcttttgttgttttgaaactgttcaataaatgcaggatcagtggcgtacggttctaaacggatcagtgattccggctgcttgacccattcatcgccgatcgcctctgtaatgatggcagacaagcctggattcgcttttaacagccagcgcctgtgggcaattccattcgtcttattgttaaaacgattcggaaacagcaagtgaaagtcgcgcatctccctttcctttaatatatcggaatgtatttttgcaacgccatttacactgtagctgcctactatggccagatgagccattttgacaacaccatgcgctgtaatcgccatgttctctatccttttccagtctccaggatacttttcccaaactgcacggcaaaacctctcattgatctcttcaataatcatgtacattcgcgggagcagcggcttaaacaaatgaatcggccatttctcgagcgcttctgacaatgttgtatgatttgtataagaaatcgtatgtacagtgatatgccaagcttcttcccagctcatgttctcttcatcgagcaaaatccgcattagctcaggcaccgcaagcgcagggtgagtgtcattaatatgaatgctcacttttttatgcaggccggataaagatttatgtgttttacggtaattgttcacaatgctttttaagcttgcgcatactaaaaaatactgctgcttcagccgtaaaattttcccctcatcatgggtgtcatcgggatataagaattcagaaaccgcttctgtttctcgcttataagacaaaatattaccgccgtgataatgggcatagggctcggcgttccaaagccttaacgtgttgacagtgcccgtttcatagccgatgatcgggatatcataaggaacagcggtaacaattgtcgcttgttcatggcgaaaatgcaggcgcccgcttttttctgtcatatggacttcgccccaaaacggcacgtccactgcttgatccgcattccttacttcccatacgttcccgtttttcagccattgctcaggcagctccacctgatgtccgtctacaattttttgctcaaacaaaccatgcttataacgtatgcccatgccgtgcccaggcaggttcaacgaagcaagcgaatctaaaaagcaagcggccaagcgcccaagtccgccattgccgagacctgcatcgttctctatctgaaggatctcctctaaattgatgccgatttcctttaaaccagcttctacaacatcacgaacaccaagattcattaagttttgctcaaggagctgaccgagcagaaattcgattgataaataatatgtctgcttcccggaatttgatctgcttttttcattcgtttcgatccaatcagcgctgatatactctctgaccatattgcccaacgttttatattgatccagcttggcagaatctttaaagctttttccgcacgtcatttccagacgctttaaaaataagtctgcaaagcgttctttactcgagaacatcccgtccactccttgtcacctgctcgaaaatacgctgatactctttagccgacttcccccagctgtaatctgcattcatagcggtcttcacgatgctcttccatacatcctgttggcaataaaacgacagcgccctttctatcgtaaatttcagatcatgcgcattaaaggcggaaaacgtaaagccattgcccgttccctcttcctcctgataggcacggacagtgtcgtaaagaccgcccgtttccctgacaatcggaatggcgccatattgaagagcaatgagctgccccaaaccgcacggctcaaatttcgacggcatcaaaaacatatcagagcccgcataaatttgatgggctagcggctcatcaaacccgatataagcccggcacttctcatgaaaagcaaattctgcataccggaaataatcttcaaattcacgttctcctgtgcctagcacaaccagctgtatgtcttgctcctcaagaagttcgtgcataattctgcggacaagatcaagccccttttgtttagtgagccttgtcaccatactgatcagcggaatatcgtttttctctggaagccccatccgctgctgaagcttcgttttgttttccagcttgcatgcaagatcccctgaatcgtattgcgcctctatataagggtcgcttttcggctgatagaacgtatcatcaatgccatttaatatgccggttacatcatcttccctatattgcaaaacctgttccaactgctcaccataatacggcgtcatgatttcatttctgtaagtggggctcacagttgtcacatgatcagccgcaatgatgcccgctttcataaaattaacaaatccgttgcattctaacctttcataatgaaaatgatccatctcaagacccagcaagtcatgtgtgacatcaggagggaatatgccttgaaactgcaggttgtggatcgtgagcacgcttttcatccgttcataaaaaggatgttttctgtactcctctttcagcaaataattgaccatcgctgtatgccaatcgtgagtatgaacaatatcggcttgaacattcacaactttggcagcctccagcacagctcttgaaaaaaaggcaaaccgctcaccgtcatcataatgcccgtacaacgaatccctgttgaaatagtactcattgtcgatgaagtaataattcacatcattctctgccatatgttcaattccgcaatattgctgccgccagccgacagctacggtacactcagcctgttttttcatacgctttttccacggttcaggtatttggctgtacttcggcagcatcacagctacctcattgcctaatcgcgcaagcgcctttggcagagcacctgctacatcggcaagacctcctgatttcacaaatggggtgcattctgacacagcaaataatatcttcaagaattcatcagctctccttgcaccaaaccttttcttaatacaagcggctgctcagctgttcctgcagcttccgtcgccttgccgattttaacatccttatccgaaatgacctgctcaagaagacaatcctctccaatctgcgttttttgcataataatgcagtttttcagcttcgtaccctttccgacatggaccgccctgaacaaaatgcagttttcaacctctccttcaagcacacagccgtttgccaccaaagaatttttgacagtgctgtgctttccgtatttcgtaggcggctcatccttcacttttgtatagatcggctgctgcggcaaaaacacctgctgccaaaaacgaggctgaatgagctccatactgtgggtataatatttttccaccgaatcaatgacagcggcataacctgaatattcataagggcaaatggtcagggcggaagattccttttcaacagcctcctgaatggttttatagcctttttcgctatgtccgtagatcagatcctttaaaagcgttgttgacatgatatagatttgcagcgactggccgtcctgaaatacctcggtgacgtcgcagccaacctcctgatggcgtttcagcacatattgaaattgaatgttgcatacggtatggctgttggagattacagcatattgctgagtgcttctgtggaagtaatctagatggtccgaaaactggcgaaaggaaccgaattcatcgtattcgtgatgaagatggggagacgggaaaaaaaagaggccgtcctttttccggtgcaaatcccattccttacccgccccaaggtgatccatgagcgaacggtaacgatacttcggaaaaattgcaacactcctaatatccgcattcaccatgttggaaagcataaaatcaatcagtcggtacctgccggcaaaagggatcgccccgagcgaccgctgtgctgttaaatcctgaagagaatgcttatatgtggtttcatctataacacctaacatttgattattgaacactgactctgccccctcttcagtaattaaatcaattctttttctacaaattcctctgaaacgagcagcacctcttcaatgtctttttcggagcgaatcactgcgccatccggcagcaccatcccattaggaacgatggcattttcaatgactacatgctccccaatcgtcacatccggcattatgacggatgatgtaacagtcgtatgcttaccaacagtcacaccttgaaaaagaacggagtgagacacatttccatatacaacacaaccttcgttcacaagcgaatcttgaacctgcgcatcagatgaaataaattgcggaggctgatttggattgacggagtaaattttccatttgcgttcaaacagcttcagctccgagtcctcttttaacaaatccatattggcttcccacaagctctgcaccgttccgacatccttccaatatcccttgaacggataagcagaaagcttctttttctcttccaaaagcagtggaataatgtctttgccgaagtcgtggctagaataagggttttgatcgtccatctcaagatactgtttcaaaagcggccaattgaatatataaattcccattgaggcaagattgctcttagggaatttgggcttttcatcaaaatgtgtgatcgtcccatctggattggccttcatgatgccgaaccggcttgcttcctcccagcccacttcgatgacagagatggtcacatctgctttcttttcaatgtgataatcaagcattttgccgtagtccattttgtatatgtgatctcctgataaaatcagtacatactcaggatcatactgattcaaataattgagattttcataaatggagcttgccgtccctttataccatttgacttctgatgactcggcataagggggtaaaaccgtcacgccgccattatatctatccaggtcccatgcactgccgatcccaatataggaattcagctcgagcggctgatattgcgttaaaatcccgactgtgtctatgcctgaattagaacagttgcttagggtaaaatcaataatcctgtattttcccccgaaagatacagccggtttggccatattttttgttaatccgctgagacggctgcccttcccgccggcaaggagcatggctacacattgttttttcatctttttatctctcctctttttttaaccgcccgtaaaatcgagatgccgtaaggggggatggtcatcgtgatataacacggtttatgatgaagtgctccctttttagccgataacggctttttgttgatttgccctgagcctccatatgtttcactgtcactgttaagcacttcaatgtattgagtaaaaaaaggaactccaacatcatattgatgatagaccacgggtgtaaaattacaaatgatgacaagcgcctcaccgtgcttttggccataacgaataaaagaaaagattgattgttcgtcattatggacatcaatccattcaaacgattgtgcacgatggtcatgctcataaaggattttgcttttttggtaaaagcggagaagatcttgcgtaaaaacgctggctttctgatgcatggggaaggagtccaaaaaccaatcaagctgttctgtatctttccattcatcaaattgagcaaactctgatcccataaagatcaatttctttccgggatgcactgtcatatagcccagcaaaagccgatactgggcaaatttctgccagtagtcgccaggcattttattgagaagtgatttttttccgtatacgacttcatcatgagaaaacggcaatacaaaatgttcactaaacgcatatagtaatgaaaaagagataagctgatgacaatgccgcctttcttcgggcggcgtctccatgtatttcagtacgtcattcatccatcccatattccatttataatgaaaaccaagccccccttcctcaacggcacctgtcacttgaggccattctgtagaatcttctgcaatcatcatcacatggggatatgcctctctcatggtttgattgagtttttttaaaaaatcaacagcatatggattcgtgtggcgttcatcctgatttggccaatacaagatattagccactgcatcaaccctaaatccatctatatgatagaattccgcccagtacaacgcattcgaaattaaaaaactatgaacttccggtttccccaggtcaaagtttgccgtgccccataaccagttctcccgatcacgttcttctttgtattcataaagcggttctccatcaaacatataaaggccatgtgcatctttacaaaaatgtccggggacccaatccaaaatgactccgatattttgttgatgacattcatccacaaacttcatcagatcatgcggcgggccaaacctgcttgtcgggctgtaataccccgttccttggtacccccatgaacgatcatatggatgctcatacacgggaagcagttcaatatgggtaaacccatgcttcttgatataagggataagcgtctgacttaattctttataggaataatgcctgccatcagaatgcttcttccaagacccaagatgcagttcataaatgaaaacaggtttttcatacagcgtcttagccttctgtttcttttgccatttttgatcttgccagctgtatccttccaaatcgtaagtaagtgacgctgtgtttggtctgacttctgaataaatagcgtatggatctgccttcagcctgatctcaccgttattcgtcacaatttcgtatttatatcgttccttttctcctatacctggaataaataacgtccaaatgccattatcattcactctgtgcatcacatgctcttctccagaccagctgttaaaatctccagccactcgtacttccgacgcatgaggcgcccacacacagaattcatatccgcttttgccattcagctcgcggtaatgcgagccaaacagctgatagcttttaaacagactgccttcgtgaaaaagataaacatcatgtgctgtcgggctggcagcggccatgtaatcatcctttctgacatcatagttttcatttatagtatttattcgaagaaataaaaaaaagccctttcctgaaagcgcttatacttatagacaattaacttcattttctgaagaaaaacgaaatatatggagatttttgtagtctgtttttaaaataaagaacaaaatctaagacatatcatgatttataaaaacaaaaaaaccttgcaggatatgcaaggcttctggatgacccgtacgggattcgaacccgtgttaccgccgtgaaagggcggtgtcttaaccgcttgaccaacgggccgataattatgatatctgtaatcatatggcggagaaggagggatttgaaccctcgcgccgcttacacgacctacacccttagcaggggcgcctcttcagccacttgagtacttctccatttggctccacaggcaggattcgaacctgcgaccgatcggttaacagccgatagctctaccactgagctactgtggaacaaaagtcatggtgggcctgaatggactcgaaccatcgacctcacgcttatcaggcgtgcgctctaaccagctgagctacaggcccatgacgatatagaaatggagcgggtgatgggaatcgaacccacgacatcagcttggaaggctgaggttttaccactaaactacacccgcaatttttatttggggcgattgatgggaatcgaacccacgaatgccagagccacaatctggtgcgttaaccacttcgccacaaccgccaaagcatattgataaatggtggctcgggacggaatcgaaccgccgacacacggattttcagtccgttgctctaccaactgagctaccgagcctaagtatttttacttttatcatcgcggggtggagcagttcggtagctcgtcgggctcataacccgaaggtcgcaggttcaaatcctgcccccgcaaccaaatatatggttaaataaggagtgccctaagggtgcaaccaaaataatcctatacaaatatggtccggtagttcagttggttagaatgcctgcctgtcacgcaggaggtcgcgggttcgagtcccgtccggaccgccattaatgtaaacgaaacgatcatgttttcgttttttttgtgttttcttttactgtatcttctgcttggtgtcatagccaagctttctttatatcgggaacatcttggatattccagcaaaattcgataaactaggaagagcacaaataggcataagcagggttgaaaggaggttttggttcatggatgaatttgatttgatacatagcattactccgcggaccattcaccattcttccgttgatgtaggaataggtgatgatgcagcgctctacactgcgaaacacggcgttcaggaaattgtttgtgttgatactatggtagaagacgtgcacttcaaattacactattcctcacctgaagatatcgggtacaaggcgttagccgttaatataagtgatattgccgcgatgggaggcattcctaagttttatctggtatcacttgcggtaccttcaaaatggactgaatctgaaatcaaggcgatgtatgaaggaatgaatgaactggcgaaactatatcatatggatctgattggcggcgatacagtttctaccgctgacaaattagtcgttacagtcactgtaatcggtgaaattgaaaagggacaggcctgtttgcgcagcttggcaaaaccgaatgatattgtgtttgtaaccggtgaaatcggttcttctgcagcagggctttctttattgctggaagagactaatcctcaaaactcatctgtggaaacggattactttatccacaggcataaacggcctgagccaagagtaagcgtcggcagattatgctcgatttttaaacgggcagctttaaatgatgttagtgacggattggctagtgaactgaacgagattgcagaagccagctgtgtttcaattgaaattgttgaaagcatgcttccaattcattctgatttgcctaagcttcatcctaactggaaagaatgggctttgtttggcggtgaggattttgagctgacagggacggtttcaaatgaggagtgggaagtgttgaagcaggagtgcgcagcgcttcatcttcccattacaaagattggctatgtcagggaaaaaacaaaatctaaagtgatcctaaaaacagatcaaacatcaatgatcttagagaaaaagggatataatcattttaaataagacgggtgactcgtgtgaagcaattaaaatggagaactgtaaatccagaagaaacaaaagcaattgccaagctgacggcagcgtttgctaaaccgggagacgtcctgacattagagggcgatttaggtgcaggaaaaacgacttttacgaaaggttttgcagaagggctgggaattacacgtattgtaaacagtccgacttttacaattataaaagaatataacgatggcgtacttcctctttatcacatggatgtgtatagaatggaagatgaaagtgaagatttgggacttgatgaatattttcacggacaaggtgtctgtctcgttgaatgggctcatttaattgaagaacagctgccacaggagcgactgcaaattgtcatcaaaagagctggtgatgatgagcgggaaattacctttactgctgtcgggaatcggtatgaaatgctttgtgaggagttaagtagacatgacaatattagcaattgatacatcaaattatacattgggcattgcgctgcttcgagaagacactgttatagcagaatacattacatatttgaaaaagaaccactctgtaagagcgatgcctgctgttcattcattgctgaatgattgtgatatggcaccgcaggacctttctaaaattgtcgttgcaaaaggccctggttcatacacaggagtaagaataggtgtgacgttggccaaaacacttgcctggtctttagacattccaataagtgctgtatcaagtcttgagacgcttgcggcaaatggccggcattttgacggtctgatcagcccaatctttgatgctagacggggacaggtgtacacaggtctgtatcaatataaaaatgggcttttagagcaagttgttccagatcaaaatgtgatgctggcagattggctggagatgctaaaagaaaaggaccgccctgttttgtttttaggccatgatacttctcttcacaagcagatgatcgaggatgtgcttggaacaaaaggattcattggaactgccgcccagcataacccgcgcccttcagaattggcttttctcgggaaggaaaaggaagcagctgatgttcatgggcttgtcccggattacttgcggctggcagaagctgaagcgaaatggattgaaagtcaaaagtagggtgataggatgaaaacaaaagcagcggtcagaaatatgcggcttgaagatatagatcacgtatacgaaatcgaagcatcctcctttacgtctccttggacgaaggattcgttttatcatgagctgctggaaaatccgtatgctcattatctcgtgattgaaaaggacggccatcttgctgggtattgcgggatttggattgtgatggacgatgcccagattacaaatatagcgataaaaccagagtatcgcggccagtctttaggagaaacgctttttcgctcagctgttgaactgtgcaaagaaaaagacgcaaggcggctttcgcttgaagtgagggtttcgaatcatcctgctcaaggcttatataagaaattcgggatgcagcccggcggaataagaaagaactattatactgataacggggaagatgcgttaattatgtgggtgacgataaatgagtgagcaaaaagacatgtacgtattaggaattgaaacaagctgtgatgagactgctgcagctattgtgaaaaacgggaaagagatcatttcaaacgtagtagcctctcaaattgaaagccataagcgcttcggaggcgttgttccggaaattgcttcaagacatcatgttgaacaaatcactttggttatagaagaggcgtttcgcaaagctggcatgacgtatagtgatattgatgcgattgcagtaacagaaggtccgggactggtgggagcgcttcttatcggagtgaatgccgctaaagcattgagctttgcatataacattccgttagtaggcgttcatcatatagccggtcatatatacgcgaaccgtcttgtagaagacatcgtgttcccggcactggcattggtcgtttcaggaggccatacagaactggtttatatgaaggaacatggatcatttgaagtcattggggaaacccttgatgatgcggcaggagaagcctacgacaaagtggcgcggacgatgggattgccatatccgggtggaccgcaaattgacaagctagctgaaaaagggaatgacaatattccgcttcctcgcgcatggcttgaagaaggctcttacaacttcagctttagcggattgaagtctgcggtgatcaatacgcttcataatgcatcccaaaaagggcaagagattgctccggaagatttgtctgccagtttccaaaatagtgtgatcgatgtcttggtaaccaaaacggcgcgcgcggcaaaggaatatgatgtcaaacaggtccttttagccggaggagtagctgcaaacagaggcctcagagctgcattagaaaaggaatttgcccagcatgaagggattacgcttgtcattcctccattagctttatgcacggataatgctgcgatgattgctgctgctggtacaattgcttttgaaaaaggaattcgcggtgcatatgatatgaatggccagcccggccttgaattgacttcttatcaaagtctcacgagataatagcgtgagactttttatctgtttgttattaacagacaattcacaatttatccacatatctgtgagtaattatagagatattgatggataaagggctgaggtcactgttaataaagtggataaattcagaatattttgtggatagtgtgtataaagcgcttactttgtttatttattaggggatgttctgtggataaaaagcacctctaaaaagaggtgcttgacttttttaatcttcttctgtggatagttcttcccattcggacaaaagagattccagctcctgattaagcttctcattgtctgcatggatagcttgtactttttcatgatcctgatagacttcagggtcacatagcaattcatcattgcggctgatgttctcctcaatggtttgaacggtggtttcaatttcttcaatccgacggagtcgttggcgctctttctttttccattctttttcttcctcgtaggaacgtttggagtcagacttcactgtagctggcgttttatcagtttcctcttgctgattcattttctccaattcaagctgctctgtttttttctctgtataataatcgtaatctcccagatactcctctatatggcttgaagaaagctccaatactcttgtggcgattctgttaataaaatatctgtcatgtgagacaaataacagtgtgcctggataatcaatcagcgcgttttcgagaacttctttgctgtctaaatccagatggttcgtcggttcatcaaggatgagaaagttggctttttgaagcatcagcttagctagagccaatcttgctttttcgcctccgctcagtgaatgaactggtttcagcacatcatctccggagaataagaaatttccgagacacgttctgatttctttttctgggagcccggggtactcgtcccacagctcatcaaggacacgtttagaggaagtcaactcagcctgttcctggtcataatagccgacactgacatttgagccgtaagaaattgttccctgatctggttttagggtgtctattaatgttttcagcaatgtcgatttacctattccgttagggccgacaagcgcagcgctttctcctcttgtgagcatgaatgacacttctgttaaaagcggcggctggttttcatagctgattgtgagatcctgaacacgaaggacttcatttccgctctgttttgtaatatcaaaatgaaagtttgcggatttttcatcgccaagcggttttgacatgacatccattcgctcaagctgctttctgcggctttgcgcccttttggtggtagaggctctcgccagatttcgatctacgaagtcctgcagctttgcaatctcgtcctgctgcttttcatacattttcagatctttttcatactgcgcggctttttggtcgagataagcgctgtagttgccgtgatactttttgctttctgctcttgatacctcgtatacctggtttactactttgtccaaaaagtagcggtcatgcgaaacgatgagaatggcgcctgaatagccttgtaaataatgctcaagccaggtaagcgtatcaatatccagatggtttgtcggctcatcaagaatgagcaaatcaggctgtgttaatagaagcttacctaaagccagtcttgttttctggcctccgctgaggctttgaacctgtgtagaatcgtcaaaatggctgaagccgagaccatgcagcacagatctaacatccgcttcatattgataaccgcctttatctttgaattcctgctgaagacggtcgtaggttttcatgatgctttctaattcacccgggtcagctgccgccattttttcttccatagcccgcatttccttttccattgcttttaagtggtcaaaaacagtcagcagctcttcttttatggtaagcttagaatccaagccagtatgctgggcgagatatcccattgtaatatctttcggtttaataatttcgcccttttcatacgaaagctggcctgcgataattttaaggagcgtggattttccggcgccatttcttcctacaatggcgatgcgatcacgatttctgacttccagctttatattgtttaaaatagtatcagcaccaaatgatttggacagctgattaacttgtaagatcatcatattatttcacctctgctataataagttaagtgtagcttatgaaccagaagtcagcaaacaatacattggccatataagacatagagaagaaaatagtgtatgatctgtttaaggagcgttttaatatgaatggattttctcattttaatgaacagggcagagcccagatggtggatattagcgaaaaatcttcgactgtccgtactgcggcggctgtttcaagcgtacacatgaagaatgaagtgtacgagaaaatacaaagtcacgatatcggcaaaggagatgtactggctgtcgcacaggtggcaggcattatggccgcaaagcaaacgtcgaatatcattccgatgtgccatccgctttcattgagcggggtagatatatcgtttgactggaaaataaaagaagcagaagttatacttcatataaaagcacaggtcaaaacgaaagggagtacaggtgtggaaatggaagcgctcacttctgcatcggtgtgcgctcttaccgtttacgatatgtgcaaggcccttgataagggaatggtcatcggccctactttcttgctggagaagacaggcgggaaaaacggtgactttaaaagagaactatccgagtataatttggaggaccaaaaatgaataaggatcaatcaaaaattccgcaggcgacggcgaaacggctgccgctttactatcgctttttaaagaatctgcatgcgtcaggaaaacagcgtgtatcatccgctgaactcagtgatgccgtaaaggttgattctgccacgattcggagggatttttcctattttggagctcttggcaaaaaaggatacggatataatgtggattatttgctgtcttttttccggaaaacgcttgatcaggatgagatgacagacgtcatcttgattggtgtcgggaacttgggaacggcatttcttcactataatttcacaaaaaacaataacacaaaaatttctatggcttttgatataaatgagagtaaaataggaactgaggtaggcggcgtgcccgtctataaccttgatgaccttgaacaacacgtaaaagatgaatcagttgccattcttacagtgccagcagttgccgctcaatccattacagacagattggtcgcattaggaatcaagggaatccttaattttacgccggcccgtttgaatgtgccggaacacattcgaattcatcatatagatttagcagttgagcttcagtcactggtttattttttgaagcattattcagttttagaggaaatcgaatagagggaaaggaggagcccaaatatgccgatcggtcctggaagccttgctgttatcgcaatcgttgctctgattatcttcggtcccaaaaagctgcctgaattggggaaagcagcgggagacacacttcgtgaatttaaaaacgctactaaaggattaacgagtgatgaagaggaaaaaaagaaagaagatcagtaagttaggatgacacgaatgaaagtgaatcaaatgtcgctgctggagcatattgctgagcttcgaaaacggttgctgattgtagcgctggcgtttgtcgttttctttattgctggattttttttagcaaagccgattattgtgtatctgcaagaaacagatgaagcgaagcagcttacgcttaacgcgtttaacctgacagacccgctttatgtgtttatgcaatttgcgtttatcatcggcatagtcttgacctcgccggttattctttatcagctttgggcttttgtgagcccgggcctctatgagaaagagcgcaaagtaacgctcagctacattccggtctctattttgctgtttttagcgggcttatctttttcatattatattttatttccttttgttgttgattttatgaagcggatttctcaggacttgaatgtcaatcaggtgatcggaattaatgaatattttcattttcttctgcagctgacgattccgtttggactgctgttccaaatgccggtcatcctcatgtttttgacaaggctcggaattgtgacaccgatgttcttggcgaaaatcagaaagtatgcgtattttacgctgctggtgatcgcagccctgattacaccgcctgagcttctgtcccatatgatggtcacagtcccgcttttgattttatatgaaatcagtatccttatatcgaaggccgcttatcggaaagcacagaaaagcagtgctgccgatcgggacgtgtcttctgggcaataataaaaaatccatttctcatgcgagaaatggattttctttatttttggttctttttgattttaaatgaaaaggcgaacatcttaaaagaaatgctgatgttgtaagcggcgaacaccatcagcaggatggagtaaaatgaccacatgctgcctggcgagcttgcggcaagataagtaaagatgcaccctacggcaaagtagatcattccccaaactaccgggtttctcataaaaataatcctccaataatcaattgcatttgtgtgctctgctgttcaaggtaattacgaacaggctcaagctgcatgatgacgacgaatgtattcatcattaaatgggcgaaaatcggcacccatatccgttttgttctcgcatataaaaaggcaaaggtaaagcccattgctgtatatagaaggagatgcttcaaatcagcgtgaacaataccgaagataaccgagctgatcagtcctgcgaaaaagaaattcgttttttcgtacagcgcgccgaaaatgatttttctgaagatgatttcttctaatataggcccgacgatggaagaaacgataatcatgagcgggactgcctgaatgacatccagaatcgcttgtgtattttctgattctcttccgatgccaaaaacataatattcaatagagcctgctattccttgagagaaaagggcaatgaaaaaaccggctatcgcccaaaggatagaaagtccgattgagtccttctgtccgtttcgcagcgtttctttcggaacggttctcagaatgagcagaacaacaacgagacaggcgataaagctgataacggaccataatccttgtgcatgcagcatattttcatctgtaggctgtcctccggcataaccgaatttaaataacaagggaatcgcgattaatgcggaaaactgcatgatgatatatgtcaaaataataaaccaatactgttttctcaaatggtatgtactcctttgttaagtgggtttcgttcatctacagctattgtaacataatcggtacgggggtgaaaaagctaacggaaaagggagcggaaaagaatgatgtaagcgtgaaaaattttttatcttatcacttgaaattggaagggagattctttattataagaattgtgttagcactctttagtgctgagtgctaaaattacatattcatactattgaggaggttatttcattgttaaagccattaggtgatcgcgttgtcattgaactcgtagaatctgaagaaaaaactgccagcggaattgtgttgccggattctgcaaaagaaaaaccgcaagaaggcaaaatcgtggcagctggttcaggtcgcgtgttagaaagcggagagcgcgttgctttagaagtaaaagagggcgaccgcattatcttctcaaaatacgcaggtactgaagtgaaatacgaaggtactgaatacttaatcttacgtgaaagcgacattttagctgttatcggctaattcttaaataaacaatacttaaaacatttgaggaggtcttgtaaacatggcaaaagaaattaagtttagtgaagaagctcgccgcgcaatgcttcgcggtgtcgatgcacttgctgatgctgttaaagtaactttaggaccaaaaggacgcaacgtggttctagagaaaaaattcggttctccgttaatcacaaatgacggtgtaacaatcgctaaagaaatcgagctagaagacgcgtttgaaaacatgggtgctaagcttgttgctgaagtagccagcaaaacaaacgacgttgccggtgacggtacaacaactgcaacagttcttgcgcaagcaatgatccgtgaaggccttaaaaacgtaacagcaggcgctaaccctgtaggcgtgcgtaaagggatggaacaagctgtagcggttgcgatcgaaaacttaaaagaaatttctaagccaatcgaaggcaaagagtctatcgctcaggttgctgcgatctctgctgctgatgaggaagtcggaagccttatcgctgaagcaatggagcgcgtaggaaacgacggcgttatcacaatcgaagagtctaaaggcttcacaactgagcttgaagttgttgaaggtatgcaattcgaccgcggatatgcgtctccttacatggtaactgactctgataagatggaagcggttcttgacaatccttacatcttaatcacagacaaaaaaatcacaaacattcaagaaatccttcctgtgcttgagcaggttgttcagcaaggcaaaccattgcttctgatcgctgaggatgttgaaggcgaagcacttgctacacttgttgtgaacaaacttcgcggcacattcaacgcagtggctgttaaagctcctggtttcggtgatcgccgtaaagcaatgcttgaagacatcgctgtccttactggcggagaagtcatcacagaagatcttggccttgacctgaaatctactcaaatcgctcaattgggacgcgcttctaaagttgtcgttactaaagaaaacacaacaatcgttgaaggcgctggcgaaacagacaaaatttctgcccgtgtgactcaaatccgcgctcaagtggaagaaacaacttctgaattcgacagagaaaaattacaagagcgtcttgctaaacttgctggcggcgtagctgtcatcaaagtcggcgctgcgactgaaactgagctgaaagagcgtaaacttcgcatcgaagacgccttgaactcaactcgcgcagctgttgaagaaggcatcgtatccggtggtggtacagcgcttgtaaacgtatataacaaagtcgctgcagttgaagctgaaggcgatgctcaaacaggtatcaacatcgtgcttcgcgcgcttgaagagccaatccgtcaaatcgcacacaacgctggccttgaaggatctgtcatcgttgagcgcctcaaaaacgaagaaatcggcgtaggcttcaacgctgcaactggcgaatgggtaaacatgatcgaaaaaggtatcgttgacccaacaaaagttacacgctcagctcttcaaaacgctgcgtctgtagctgcaatgttcttaacaacagaagctgttgtcgctgacaagccagaagaaaacggtggcggcgcaggaatgcctgatatgggcggcatgggcggtatgggtggaatgatgtaataaagggatattaacccttatacatcaatgttttaaccgtcttaaaaaactagacaaagcgtgaataaaaaaagagaaggtctttcatcagtttactaaactgttgggagaccttttctccatattagcggtcatatgagcataaatgtccatcgtcgtatttatgtccgaatgaccaaattgttgctggatttctttaatgcctactcctgcctcaattagtaaggaggtatgggtatgcctaaaagagtggggggtgacattctttttatcccagcttttttgagcagccgtttaagtctagtctcaataacctttcttaattgcggatgaccatcctcccgctcaaaaataaatgatgagtcttgataaatcaatctatttttaagcttaatttcattttgataaattttatttttttttagtagattgacatcgtttcatcaattcgaacgatatcaacagatcctgttgttttaggtgttagcaattggtatttttcaatttgattgttaggggtgtatagggtctttgtgacctggcttatcattgaaatctgtccattttaaagcaagaagttcaccaattcttaggtcggtctaggcaagtacggtaaagaccaaatggtccatttctagcccgtcagattgagcgagctttagaaaatgtgtcagcacctctttttccaatgctttgttgcttcttgggtaattgaaaatccccagttgggttcattttaataatcccttgagttttagcttttcggaaaatcatacggccgcaggcatgaatacctcccaaacaattgtgactgtattgctcgttcagttctaacgtgcggtcttcatacatttttttgtgttttgctaatcgggtattgacccaatactgcgataaaatgcatcattttcttttcactggcccgtacactgcttatttttaccccactccggttgtaaatcttaagccaaccttttgcaaatgttttgaagggcatatctgactccttaataaaagtcccgttgtcgttttggagttctacgtgacgggctgctactggggcttctttctttgttttaaatcttcctttggatatttctagacgttttttggttaaagggtcaatgcctagtagatatgataactccacgtcttaccgcattgcttgagttttgccatttatttgtccctaactaattttttttcatcaaattggtctttaagtgagtttaataatttttgtttctctcgactggtcaataattgcccttcatatttcaaaagattggataaatttgagatggaatcaatcctgatggattctaaaagctttgtaaatttctaattttatcctggcctactgtgcaacagaccttcttaatcgagcctaattttccatctatttgattggggaacaaatggctttttaacaagaaagaagtccaagaatacattgattggtggtcaattgaggttaaaaggaaaaagagggcctgatatatctttcactttcgcctaactagcaaaatttaataaaacgataagcgatgtgaggtgaaaattatgctaagtgataataattttgtttccgaaacactggagaatgtacagtatctattgccaggtgcaaaagtaatcaaattgaggggatacagcagggcccacaaagtatacaccattgcaaaatccccggtagaaaagtggaaggtcgccgcaggtttatccggatcagagatagcaattctgattagaaaaggtcattggattggtgcaagcattccagctggcggaattgtcatcgatattgatgattcaaaacagggagagctagtgaaaggtttactagatgcgcaaaactttcattgtcattgtattaggaccctaatgggtggcagtttatttttaaggataaccaacatggggaaaagaaaattaaacaaataaccaaattttttactcaaataggtatcatagtcgatgctgggatcgctggggcaggctatattgttttcccaacaagtaacactgaggacgatatatagtaactaagagtcctaatgagttagatgaaatacctaattatctgaggcctgtacggaattctgttaatgtaaaggacaacaacactggtgaaaaatatgtattccctgtaccaatcgacagagttggtagcagaaatgatactttaaatttgctacacatttgaaagcctggaaggtggaaccatacgaaattagcaaggccatggaattgatttataaataccttctgctggataaaaaagatttctctttggaggaattttataaactcaccatatatgctatcaaatggaaactggaacaagctcagtttccattgtatttagaatccacaaaaaaatcgcatcaaaatgttattccccagccgtttaagataaaaggaaatgtcttatataaaacggtaatcaagaatagcggggactttgaagaatagctcatcatggcgtgtaggagtgattcacccttttaagaaactgtctaatatcgaaagaaacagtgttcattatgaactagcctcaaacgataacggacgcgaaaaaaaggatatagttcctgctagtgttatatcaccaagcgggagttgcttttcattggcggataatgggctagttgagaaggaagggcaaaaaatgaagctgacagagagacaacgacgcttttgtgatttctttacagaaactagaaatacaacagaggctacgcgtctagccggaaacaaagggaaaaatctcaacagagtagcttctcaaaacttgtcaaaactagacattcaaactatatagagcaaagaaataatcaactagaagcggagcgcatagcaaacattattgaggtaaaaatgttttggacaattattatacgcgatggaatagttcggttaaagagcgactaaaggcgtctgagtatattactaaaacaaatgcggccttcaaggaatagattgaacatactggtgaaattaaaacagggaatgaggaagaagctaaattcgaatgagagtgatctaaggcttctagaattgtatatggaggtgtggtaacgtgagcaagcttatatagaaggattaagtgatcaagtttagtgtaatactaggaatgataaggtgttcattaacgcacattacaactaaaaataccgtaaatgccctcaagaggatgatatatccaaagcaaaaaccttcattctttcatgaatttaaagtattatataagctactgaaaaagttttgtataaaaggtataatgataaagaacattcgttcttgtatggggtactttctctgagaatgaaaataatgtcttagggtgatataatgacaaattttattttaaatgaaaataaacagttatcattggcaattgaagatgagaacatagaaaatttttatatagatggtacagatttagtccgaaagataatccgtagatcaggttcaggagttacatcacgggttccggtccttagcacccaagatttagaaaacaagaaccttcatgaattatacgatgaatcttggctccgtatgaaaaacagacccaatactgagctcactactgagagtataaatattgcggatttatttagtggatgtggaggtctatccttaggggtttgggaggcatgccgtgccctggggataaatccaagattttcgtttgcttgtgatcttaacgaagctgccttatctgtgtacgaaaaaaacttttctcccgattttagcttgaatgaatccatcgaaaaacatattaatggcgagttaggtgctccattaactgttgaagagcaaagaataaaagataaggtgaaaaaaatagatttcattctagcaggtcctccttgccaagggcattctgatcttaataaccatactagacgaaaagaccctagaaacgctttactaatgagagtaagtagagttatagagttgttccaaccttcttcagtattagtggagaatgtaccaggaattattcatgataaatctggttcttttaaagaatttaagaatcatttaaagacacaaggttattacttcgatgaaatcgtactaaatgctgaaaaactaggtgtttcacaagcacgtcgtagatattttatttttgcttcaaaaactcctgtatcttccttaaatcaaataaatgaattttattcaaccaatagtaggccaattagttgggcaatatcagatttagtagaaaatgtaggtgatgatatattcaacactgcttccgagcattcattggaaaacaaaaggagaatagaatatctttttgaaaataacttgtttgaattacctaattcagaaagaccggattgtcatcggctaaaaccacattcatacaaatctgtgtatggcagaatgtattgggatagacctgctcccactataaccagagggtttggatcaacaggtcaagggagatttgttcattctttgttaaagagaacgataactccccatgaagcagctaggattcagttcttcccggacttttttaactttggtgaccttcggaggagacagtatcaagacgttatcggtaatgctgtgccttccaaactatcctatttattagcattacatcaattaagataaaaagatttgaggttgatatctttgaaagttgttagtttattctccggcataggcggaatagagcttggccttcatcagtcaggacatacaacagaaatattttgtgaggttgatcctttggcaaaagctgttttatcaaaaaacttccctggcgttaagatagaagatgatattaatgaaattagagagttaccaagctgtgatttagttgcggcagggtttccatgccaagatttaagtcaagctggaggtaaagaagggattgacggatcacgctccggtttagttaagaaactatttgaacttatagaaaagaaagaacatgcaaatcgccctccatggatactaattgaaaatgtcccatatatgttaaggttaaaccgtggtaaagctatgtcatatttaacatctgtcctttctgaattaggttatacttgggcatatcgaactgttgatgctcgttgttttggtttaccgcaacgaagacatagagttattttgttagcctctttatttgaagatccaaaagatgtgattttttcacaggatcattcagaaccagatttagatggaaagccttctgttgtggatcattccaactattatggtttttattggacggaagggttaagaggtgtcggctgggcacgtgaagcagttccacctataaaatgcggatcgtctgtaggtatagcctctccacctgcagtttggtctccttacgaggatatagtagggaccattaatataagggatgctgagcgcctacaaggattcccggaagattggacaaatatcactactgaaacaggtaaggatataaaagaaggtgccagatggagattggtgggaaatgctgtttcggtaagggtttctaaatggattggtgaaaacttaagtcagccaaaagggtcgatatcagattttgaaggtgaattagtgaccaagacttggccaagtgcagcatgggggtacggagataaaaagtataaagttcccgtatcaaaatgggttgcaaacacagaacaaatagctatttcagagtttttaaatcatccattaaaacctttatctgctagggcattaaacggttttttaggtagagcagccaggtgtacaaatgtaaattattcggatgaatttattaactcgttagaacgttgtaaggataggcaacttcaaaaggtttaacttttcacattaaagagagcatactaaaaagtatcggagctggataaaaccagctccgttttttatctttaattttttttgcattattccatcttttattcgaccagttccataaactccttttcaattctttgggggtttcgggtctcggcaagactttcatctaccctgaagtagaatttgatttttggttctgttcctgaaagtcgcaggcacatccagggatccgacttcaagaaaacatttaagaacatttgactgtggaaggcccatgagttcctcagggccttccacagtctctcgattccggtcaagtaatcctcaacagtggtaaccttgacggaaccaaagctggccaaattcagaacggaaggcagcgagggtctgctgaatcagttctgccccttcttttccctttagtgttaatgagcgcaggccttcctgaaagtagccatattcttcaatactaaggagagcttcgtatagtgaaatccttttttcttatagtaagcacatacctcaactgcaaggacatccgtctgaacagcatccttgtctcggacaaagtcgccaatcagatagccatagctctcttcgtacccaaagaggaaattatgttctcctgtcttgtagtagccattaatctttctggcaatgaacttaaatcccgttaatacaccgattgtttcgactctgaaagaggttgcaacttccctcccaagctccgaggtaacaatcgttttaagaacgatcccattagatggaagtgttcctttcttttttatttgggttaagatatagtggagcagaagtggctcggtttgatttccggttaaaaccgtatactcaccattttcatttttaacagcaattccaagcctgtctgcatcgggatctgttgcaattaaatatcggcgtcaatttgctgccttccctgatggccagctcaaacgcggcatgttcttcagcatttggactggtgatagtggaaaacagagggcaggctgctcctgttcttttcccaccgctacatgcttgtagttcattgccgccaaggccattgcagtagatttgctgtaccatgaagcggcgtaaatacaaccttgatgtctgtttcatcttaaatatttgagttttctgaaatagttcaaggtatgccttgtccacctctgcgctatattttgatcaggccctttgctaggaggaagctggccgccatctggcccataaactttatatccattgtattcaggcgggttatggctcgcagtcacaacaataccggcaaaaccatgaaggtgacgtactgcaaacttaacacggttgtaggccttaatgactcgaaaacgtatgcgctggatgccagtgtcctggcggcttccattataaaagccgccaacccagcagaaactttccttaacgtatagatgtcatccggtttgttccagctccaatttccccgcgcatgcctcctgttccatatcccaaattccttataaaaagcatcttccaggtctttctcattccttcctgatttacccaaccccgattttagctcggtgcaagttgactaaactgtagccatttttctgttttgtttttccagcctatgattgacctacaataaaataacattattgttcattataatatagtctagaggttttcgaacgacgactttctgacataaatcgagtgctcttgtctgattatgtctagttatagttggttttttttattttgtctctaaatttgatgagatcatggtggcgaggaatttctttttcgacagccccaatcagtaccaattcgatatttgaattggtctctcaaacaattccatcctctttatttattatgatacaattatattaattagaaaatacatacatattagcttgtgtgattttatgggggtaaaatcaatgacttttataaaaagattagaggacgcttatgaaactctattagggaattaccctgccggagtatctagtaccagtactagtaagtataacgaaatacgaaagattgtttcagaagccttcttgatcggtgaaaatgaagtgtatgtaacgggaacatcaagaaggattagcaatttggacactcggtttgctcaaggaaatcaacggaataaacatacccggatggcagttgcttttatttctataccttctgtggacgattcggaattagatgaactaattataagaacgagaaatagtgcaattacaacctcatctaaattctgtaacggggaagaaaggggcacgatttttgacggaatattactttttttagtatttgagggtgaaaccaaagtgtatccgctagcattcttagttttcgagaacgattttgaattaaaggaaaaggctgaggaattgattccaggaattgaactcaaagaatacccgcgagctaatcaatccccagcccaggaaaataacaaaagcgctaaaaatgaagatgaggaaagtgcaaagagctatgtagtcttccttgatattgaggaagatggttctattgtggaatttgtagaagataaagacaaaacctatagaattggtgatatgatttggacggcttcacatactaatggttcatcagctatcacacgcagactggaagtaattgaagtcgttgaaaatcttgtggtgtgtaagataaaacataaatataatgaacctgttgataagaattcactgcttaagtttgtaaatattgaacaagatttgatttcatttctagacttacatccaaatgtccaaaatggaagtgagggatttgtatctggggacattgttgatgagaacgctactacatcatcggatgacttaccggaagactttgaaaataactaagcgataaactttaaataggggaaatgaactgatggaaatatccaaacaaacttcagatttattattgagcctagaaaagaaaaaaggcactttaccaaaattcagcgttttacgcagtattcctaggaataggattatttatggtgcaccaggaacagggaagagtaattatctagaaagggaagtgggaaagatctttggtgataatccatatgtattcacccgagttacttttttccctggttatacatatggacaatttataggtgcttataaaccggttcctatatataaaaaattaagcggtgaggaagagatatttagttcaaactttagggataagatggaaaactttgagccaatgattgattatcaatttgttcctggcccatttatcgatgtattaattaaagctctgaaaaatagatacactaattttatattaattatcgaagaaattaatcgtgccaatgcagcaagtgtttttggtgatatttttcaattattagacagaaataaaaacggtgaaagtgattatcctgttacattcgggccggacattatgaattatttagcgagaaacggaattaaagatgaaatgattaagctaccatccaatttctttatttgggcaactatgaataatgcggatcagggtgttttaccgctcgataccgcttttaagagaaggtggtcatttgaatatttagagttggaaaagtatagaaaggcagtggactcttggaagctgagcctcagatataaaggtcataataaagtaattatgtggaatgatttccgagacattattaataagcgtcttaaaggaaaagtaccagaggataagctgcttggaccttttttcctgaaagaaagtgaactgtggaatcagaatgtatttaaaaataaactgctttattatttgaaggaagatgttttcaagcataatccaacgattgattttttaaatgctagtactttctctgagctaattgaaaaatatgatggctcggataacatttttacttttgacatagatgattcgtcttttgtgagtgattaactatggataagtcaagtaagttcttctttgaagatcaaaaatacaataaagaaaggattgtacgtgtactcggtggtaatttagctttactcaaaagtaaaggtatattatatgaagattctagtggggatttaatatttaactatgtaggtgttatatctaatgggcgcaatgtaatattcattttgcctaaatactgtaacaggcacttagatgaacattcaaagcggactttgtttaataagttgctgaagatttttaaaaaatattcaggtttaaataaaagccgggaatctgattatttcgtatcggagctagatagtgatgaagtctccgactttatgatagcagattatttgcttaatgatttctcattgaatgggtattatcaaaaaaaatttactgaatatgaaattgatggagaaggaattatagattggagtaagacagttaatgaaattaccccagtattctcaaagggagttccatattatttcagtacttataatgaagtggtacaaaaagacgagtatcacttgatagttaaaattcataaatgggctttaagtaaatattttaatgatttcggagtcattttaggttttacgggactagaatttgataaatcctgtgatggtatgaaaattttggactacgctgatttttttggctcagtaataaataaagaaatcgtgaacacatatgttgatcgtgacgttaaattgttaaaggcattgaaaaccgcaattgatagggaagagaatcagttttctaaacgacccactctttctctgtatggaacaaaatactttcacagagtatgggaggaagtatgtaagaccgtattttcccatgttaatgaatacgtaaaaaagatatcaaggccaaattggattaactttacggatatagaggttaataaagagaaaaaaacactagaacccgatattattaaggctttcgaataccgttcaaaagaatactttttaatattagatgctaaatattataatataaattttgacggaaaaaagctggaggggaatcctggggttgaagatataactaagcagctgttatatgataaggcacttgaaaaactgtccagaggtaaaacaaaacataatgcttttctgtttccttcctctaattcaaccaatacctttaaagtatttggttctgttgattttgattttcttgatatagccgctgtaactcttgtttatatttctgctgaacaagtttataacttatatcttgaaaataaaacattttccactgatgacttatttaaatttgtaagtgaaattaataagtcaaaaaaacgacatagcgttataacttcaacattgtatggtaatatgtttttgtttacaaaaagattaagtgataaaaattagttctagaaggttaaaagccgataacataatacttgtcctcggttttgtcctcctatagttttaaaaatatttatcagcattaaatgttaagtctaaaaaacagtattttgagctggtttttttaatactattttcaactgttattagtcggaatgaatgggttgcatgatgtaaaaccgacaaaaaactcttgataaacaggggtttgtcggcaacggacttttatttttgatgcccttttggccatttgcaaattttcaaggcttctcatgagttcaccgaacttgtgagaagcttcttttttgatgtataaataaacatgtgtagtgtgtacaagcttacatggcatttcatttatggaccgcttctctctctattgcagacaggataccctattggtatactctcatacgacacaaaaaagacccagttatctaaataagtagtgccacccactcttagactgtttcccctagaaaagcactgtcaaagaggaatcctgttaaatcttgtgcttctttgcttttttagctaaaagacgatgttttccttgcaataaggaactcgtcttttatgttaaatataaagagcgacagaataatgacatctgatccccaaaaattcactgtcgatggagttagattcttccaacagtaccttaataaaatccgtcccgacgctatggagatagacaacctaattatcaactctgatattatcaaggaggacttaatagtgcatgtctcaaaaatgatagatcgtttggctttatatgatttacacagaaaaagaagcatagataaacatttttctgctgcttttacagtcgatatcaatgatagagaggaattttacagtgcaaatatagctgatgtttcaattgatttgaatgaatctagtggtgtttaattgaatctcatattcttcagaagaaccattcaatacttcttgaacaatatttaaagtattcatcagcttcctctactgaaacaatatcttcaatgaaatcggaaaagtattctagttctgttcttgttggaagaactattcttaagtatcctaaagggtctcttttaaatgaatataccatgataaatcagtctttcctttctgtttattcttagttaatattgatcgtacaattgagtcgacaagacaggctattgtagatttacgggcgttcattcactggataaaagcaaataaaaaagggcctgttatcatagtcggagtaagccttgggggatgggttactaatctaattgctaccctggaatcgaaaattgatgtagtggtatctatcttttatgccaatcgcctttcttattcgatatggaacacgatcccaggtaaatacataagagaagaattagaacaaaatggtgtgacctataatgagttaataaaatattgggatatcacagatcctagtcaagccttgccgaaagttaataaagataacgtactgctgatttctgctaaacatgatcaatatattgacttgaaagatgcagattatttatgggaaagttgggggagacctacaagatatgtctacaattgtggtcattccggtattgttctttgtcgcaaaaagctggcaaatgatacgctttcctttatacgagaaaaactggtttgatacatttgtagactttaataagaaacgaaaggccaactgcgacttcagttggcctttcctatttataataaagaaattgagtgagattgctgacagaactacgtactactcgttttctttagttgcccttgctaatcgttcaacctctccccgaatcccaatcgcaggctcccacgaatcaatcaaacgaatcgccttctgattagattccaccgctttcgttttctctcctttacgatacaacagctgcgccattccgtagtgatagtagatcagttcaacttgattggcgttatgtttgtcatagagcatttgctcaaaggcttcttccgctttttcaaactgatcacatttcacgtaagcgacacccagattgaaataggcttctatcgttttttcgccgccgtatgtggagctgatttcatttgccgcttcgtataattgaatggcttctacatgataacctctcgcaaagcttaagtcaccgcgaaccaatagaactctgtgttgaatggtaggggaaatcggttgattttcgatttcgtttaaaattgtctctgctttttcctgttgcccgtcttttaaaaacagccttgctttgagtgcatgtccccaaacctttagatcataggcatcgtgagcgtctgattgttcaagaatcttcagcccggcttctatttgctgaagcgctccgtctaaatcattgacttccatcaatgcccagcctgaggtgtcgattcggaagtacgcttctcgtgtgtgttggcctaagtgatgggcggcgtcggccgctttgcgtccgtattcgattcgcaggggcaggttgattctgcttagaaaatggctaatgcgggtgatgagttcgattaggatttctttttgttcagtttcacttgcccattggatgacctttaagatgtttggccattcttgtttcatttgatctaagttccgtcccagcaggtagctccaatagatagagttgggctgttcccgctttaaatgggtttcggcataatcaatataatagtgcgcccagcgattgcgggcttctttttcatattcgtgctgttcggacaagtgctgttctccgtaagcgacaacggtttggtgcgctaagtattgtgtcctgccttggcttcgttccggctgaatcagcgcatatgaccgcatttgttccatagcgtaatgaaaacggcgggcgtctaatccggctgctgccgccaggcttttttcatcaggcggcttgctgaaaaagcaaagcgtctgccagagctttcgcgtatcttcattgcatctatcccaggtgcggccaaagaggaattcaaacaattccagcagtgagtagcctgcttttccaagctcatgaatcagctgctgagcggggatgtcatcgtctgacatataggcaatgctgagtgccatggctttcgggtttccggcagtcgctgaaatgaattcgtttttcaggtcagatgatagatgtaacagctgctccagcttttcccgtttacgtgggaggttgcatgtttgtaagcagtgatgcacttcttgttgaaaaaattcgtgggcatctgtttggtcaagaccgcttagctgaatggctgtcatttctccgaagctttcccgataagtttgctttacgttttcccgcgctgtaaggagaacttttacgccttgcggaaggctggtgataaattcatgaatgtcacgttctgcagtatcaatgctgtcaacgatcagcaggatcggtttttctctagtgtaattggctaacgcattgcggacgacaaaccgttttacattgattgatttatcgatttgttctttgcgtccgagctgataggcgatcgtatttaaaaaatcgctaaagcttaatcctttccaatcagcgctgacccagatgatgctgttgaatgccggccaaactgaagtatcgtcgacacaggaataggcggcttcaagagcaattgtggtttttcccatgccggcccagccggtgattaaacagactggtgatggagaaagcatccattgccgtatcgcttccatatcaaagctgcgtccgataaagcgtccggaccagcgtgagggtaaattatgcgtgatgggctgttctgtaagcgcattcgtttcttggccgggtctgtcatgaaacagccgttttactacattttcaatttcgccttcactcggagccccgaataatccgtcttttcgcagtattttcgcttttttcaaacaggatgctgcccatacaggcaatgcgggtttgatgactgggatagtggtggcttccagcaagtcggtcaaccactcgatatccaagtcggtcttttcgagaatgatccagatcattccgaacagttttccgtcgtcgattcttccgggaatgtagtttgcccccatctgtccgatccagcttttgatcgtgtttggggagactcccagctggagtgcgattttatctatgtaagactgtcctgttttttcattctttttccttctgactttataatcaggatgaagttttagcgttttgacgccaggtgccagcatttgtgcaaattgttttcggttttcaagttcagccataagcctgcacctcctattagtactattttatcaatccagcgttttttgtatatgaaaaaataaaagtacagtgccgctgtccttttatacagcaggaaaggctgttgaacgtgttaaaaagcagataaaatgggggcagtaacagagaaaacaaaaatgtatgcacttacattttattttctaaagaaaggaacttgccaaatgactcacacagtacctcaaaacatgaaagcggctgttatgcacaacacaagagagatcaaaattgaaacattgcctgtgcctgatatcaatcatgatgaagtgttgattaaggtgatggctgtcggaatttgcggatctgatctgcattactatacaaatggccgaataggcaactatgttgtggaaaaaccatttatccttgggcatgaatgtgcgggtgaaattgccgctgtcggatcatctgtcgatcaattcaaggtgggagaccgcgtcgctgtagagccgggtgttacgtgcggacgctgtgaggcgtgcaaagaaggacgctataatctttgcccggatgtacagtttttggctacaccgccggtagacggtgcgtttgtccaatatattaaaatgcgtcaggactttgtttttttaatcccagactcactttcttatgaagaagctgctttgatcgagccgttttctgtcggtatccatgcggcggccagaacgaagctacagcccggatcaacgattgcgattatggggatgggccctgttgggttaatggctgttgccgcagctaaagcatttggggcaggcacaatcattgtcaccgacttagagccgctgcggttagaagctgcgaaaaaaatgggagcgactcacattattaatatacgtgaacaggatgcacttgaagagattaaaacgatcacgaatgatagaggcgttgatgttgcttgggaaacagcagggaatccagcggcattgcaatccgcactggcttctgtgcgccggggcggaaaattggcgattgtcggtttgccttcacagaacgagattccgctcaacgtgccgtttattgcggataatgagattgatatttacgggatcttccgttatgccaatacgtatccaaagggaatcgaatttcttgcttcaggcattgtggacacgaagcatctagtaacggaccaatattcgctggagcagacgcaagatgcgatggagcgggcgcttcaatttaagaatgaatgtttaaaagtgatggtgtatccaaatcgctgagtgaacagggaggatcttcgtattctccctcttgtttactggaaatgaaaacggattcttggggtgggaaatgatgattggaacagaaaaagtaacggcattgaaggcgaagcatcagtcaaaatccagcaccggcctgtcctggtttgaacgaatcggttatggattcggcgatatgtcgtataatattatctttcagtttgtaaacgcatacttattattttattatacagacgtcggcggcattcagcctgcggtaatcgcaactttgtttcttgttgtgcgtgtgctggatgctatttttgacccgatcatgggattgattttagataaaacgaatacaaggtggggaaaagcaaggccatatttgctgtgggtggcatttccttttgcgctattcacattcttatgtttcacgacgcctcatttcggtgagaccggaaatatggtatatgcgtatgtcacttatattctgcttgggatgtcctttagtatgcaaacgatcccggtgaacagcttaacggggcggatgacgaattcggtggaggaacgaacggttctgaccacaacccggatgattttggtgtatatcggcattcttttatccatttcctgtgcgacaccgcttgcaactgctatcggaggagaggatcaggcgtttggatttcagatgacggcgctcatctatgcggctgtcagcatcgttttgaatctatttagtttctttactgtacgggagcggattcagcctaaaaagagaaaaaaacaagggatcaaaaagacgttatccgttttattcaaaaacaaacccttgctcatgttaatttcatcatttttggcttttgcgatcgggtttaatattaagctcagcacgatggtgtattattttacgtataacgtaaaccataaagagttcgtgtttatgggcaccgttttatttttcggggcagcgctgatcagcaatttgtttattcctttcttttctgagaagtggggcagaaaacaagtcatgattatcacggcagctctatcgcttatttcttatgccggcctgcattttacgccgtattcttcaattccactcattttcatttggcttttcgcttcgggatttttcacaacgcctttaaatacgcttgcttggggaatggttgcggattgcgtcgattatgcggaatggaaaaccggaattcgcgcggatggtgttgtgatttcgagcatgagctttattaataagctgggtgttgcgttagccgggtcattttcggccatttatttaggaatcgccgggtatgtggcgaatacagaccagacagttgcgtcgttgaatgcgattaaaaatatgaatgctttgattccgggatttttcattttgctttctattattcttatcgccttctatcctttaacggaaaaaagatataaacacatcatctctgagctggagcaaaggtctgcgagataaatagatgtaaaatttttaatattcaatgttgtatttatggcaaaaagtaatatactgagactgtaatctagactttataaatgagtgtgataatatgcgtagtcattctgtagtttgtattggggaattgttgattgatttcttttgtaccgatgttgacgttgatttaatggaagggcgccaattcctgaaaagtgccggcggggcaccggcgaatgtgtcggcagcgattgccaagctgggcggagacgccgctttcagcggaaaagtaggaaaggatccgtttgggtattttctgaagcgaacattggacgctgtacatgtcgatacctctatgctggtgatggatgagaaagcgcctacaacgcttgcttttgtttcattaaaacaaaatggagagcgtgactttgtttttaatagaggcgcggacgctttgtttacgctggaggacattgaccaggaaaaactaaacgaagcgaaaatccttcatttcggctctgcgacggcactgttatcggatccgttttgctcagcctatttacggttgatgtcgattgcgaaagacaatggacagtttatttcgtttgaccctaactaccgtgaagatttatggaggggaagagtctcagagtttgtaagtgttgcgaaaaaagcgatcgctgtaagtgattttgtgaaagtcagtgacgaggaacttgagattatcagcggtgtgaaggatcatgaaaagggagttgcgatccttcatgagatcggagccaacattgtcgctgtgacacttgggaaaagcggaacgcttctttccaatggaaaagaccgtgaaatcattccaagcattccggtgacatcaattgactcaacaggggcgggagatgcttttgtcggtgcggctttatatcaattggcaaacacggatcagattcaatctgtagatgctgattttgtgaaactgcgtgagattgtggcgtttgccaataaggtcggagctcttgtgtgcactaaaattggagcgattgatgcactgccgagtttggatgagattggagtttctttgtaaatcattgaagatgtttcttgaaagtctttggacttttgggggcatctttttttattgcttacatttttgttcaggtaaaaagttgtatattttttgtttgaaatgtcattttttattaaaaaagtgaaacttttaacgataataaatagtatatgtaacaagggttaccgaattagctttaggaggaacgatataatgagtataattggaagatttaaagatattatgtctgcgaatatcaatgctttattggacaaggctgaaaatccggagaaaatggtagatcaatatttaagaaatatgaatagcgatttggctaaggttaaggcagaaacagcagctgttatggctgaggagcagagagcaaaaagagaatatcacgaatgccaggcggatatggaaaagatggaaagctatgcaatgaaggcgctgcaagccgggaatgagagcgatgcgagaaaatttcttgaaagaaaaacatctttggagtcaaagctttctgagctgcaggcggcgaatcaaattgctgcaaccaatgccgcacagatgagaaagatgcatgacaaattggtatctgacattggagagctggaagcacgcaaaaatatgatcaaggcgaagtgggcagtagcgaaaacgcaagaaagaatgaacaaactgggcgcttctgtttcaagtacaagccaatcaatgtctgcattcggccgaatggaggacaaagtaaataaggcacttgatcaggccaatgcaatggctgaactgaacagcgctccgcaggatgatatggctgatctgtctgcaaagtatgacactggcggttcaagccaggttgatgatgaacttgcggcgttaaaagcgaaaatgatgctcgataagtaatacataggaggccgcagctttcggctgcggcgtcattttatcataaaatgtgagagggaacggtaatgataatatcttataagtgtccgaactgcggcagtgatatggcatttgacagtgaaaccggctcgttatcctgcagcagctgcggaagacaggacaatattgaaagccttccgaaagaaaacattgcggcacggttttctgatgatgaagcaaaagaatatcaatgtaaaaactgcggtgccgttttgatcacggaagctgaaacgacagcaacgacgtgcagcttctgcggaggtgctgcaatacttgccgatcgtttatcaggacatttggcgccggcgaaggtcattccatttacaatcagcaagcaagaagcggagcaggcatttcgaaagtggtgcaaaaaaggccttctgacaccaagaggtttcatgtctgctgatcgtatcaaaagcatcaccggcatgtatattccattttggatgtttgatttaaatagtgaagtacaggtgagagcaaactgtaccagagtccatcaatatgaagaaggggattatatttgcacggaaacagagcactttgaagcgtttcgtgatatcaatctcgattatttgaaaatccctgtcgatgcctctgaaaaaatgaaagacgaattaatggacaaattggagccttattcatacgaagagctgaaggactttcaaacggcatatttggccggttatattgcggaaaagtacaattataccgatgaggagctttttccgagggcaaaagagaaaatcagcagttatatagattcatacatccattctactttttccggatatacgtcagtcaatgtgagggacaaacatattcacacgaaaaacgtgaacagcttttacgttttgcttcctgtttggatggtcagttacgattatgaaagagcggagcatatctttgcgatgaacgggcaaacaggaaaggtcgttggaaagccgccgatcagtcgaggaaaagtggctgcatggtttagcggaatagcaggcgggacatttcttgcgttgaagctcgtctcattgatgatgggaggcggattttgatgcgtggattttttgggaaagcgatctttgttgtgctggctgttttcatcatgatgcctttactgggtatcgaagcggtaagagcctctgaattgcagcagcatgtgtacgatcgcgctcatctattgtcaaaagcggagatcggaaaacttgaatctctctcggcaaagctgggtgcaaagagggacactgatttcatcattattacgaccaaaagcacaaacggtgaagatattgcagactataccggcgatttttatgatcgttacggaaaaggcagtacagccattctgacgattgatatgacaaacagagaagtgtttatcgcaggctttaaaaaagccgaacagtatttggacaacagcaggctcaatagcatcagaaatacgatttcatctgatttatccaatgaaaattattttgaagcttttgagacatatattcagctttcctataaagatatgggcataaaaccgggagtaaaccctgacaacatattctttacatggtggtttcagctgattgctgccatcgcagtcgggggaattgcggtttcaatcatgctttatcatgcaggcggcaaagtaacggttaatggaagtacatatatggatcagcgtacgtctgatgtgattgatcaatacgacacttatattagaacgactgtaacaagagaaagaaaaccatcagataaagacagcggcagcgatggcggtgttacgaaaggcggcacgtcatacagtgggagccggggcagtttttaaatgtaagaaatagagaaagggagaggcgtaatgtcgtttttcagaaatcaattagcgaatgtagtagagtgggaagaatttagagatgatatgattttttataaatggaacaatcgtgaaatcaaaaaagggagccgtttaatcattcgtcccggacaggatgctgtctttttgaacaatgggcgggttgaaggagtctttcaagatgatggcgattatgatattgaatcagaaattattccattcctttcaacgttaaagggctttaagtttggctttaacagcggcatgcgagctgaggtgctgtttgtcaatacgaaggaatttaccgtaagatggggaacaaaacaggcgataaatattccggcagcgggaatgccaggcgggatgcccattcgcgcaaacggcacatttaatttcaaggtgcaggactatatcagcctgattgataaaatcgctggcgtgaaagatcaatattttgtagaggatattaaaacccgtatcatttctattctggatcagcttctcatgaagtggatcacaagagaagggaaagatatgtttaatcttcaagcaaacgcttttgatattgccaagggaattcaagaggacttagatatgcaattaataagcgacgggatgacggtcactggttttcaaatcatgagctttaattatcctcaagaggttcaagatatgattacaaagaacgcttcctacggtatggttggggatgtgaacagataccagcaaatatcaatgacggatggaatggcatccggaaagatgagcggaagcggagcggcttcggatatggctggaatgatgatgggaatgaatatggccaatcagatgatgaaccaaatgaatcagaatcagcaggcacagtcatcaggcccacagtcaactggcagcggaagcaaaccgaatttctgtccaaactgcggaacaaaaacgggcgaagccaatttttgtccgaattgcggccagaagcttgtataagaatcatacagtgaaaagtccggagtgatcagcactcgggacttttttatttaggagaataagcattacctattgcttgctcctgaacaggccattttcgagcccccgcttggataattcccagcagcaattgacgacgttcctttattgaattgacggcaatttgaaatgtttgctttgataaagccggtatgcctgattgttgaagctttgagatgtctggttctggcggcgcttgttctgcaggatggatataggcagtatgaacggtatccagatagtttttgatacttgagcgcgcttctttgatatgaagctgattcggctgatattgttcaggaattccgtatttgaaaatggttagagcctcatccaatacagcaacagctataatggatgattcctgatgctgcgtgctgtggtaaaaatgaaggatggggaaggcgttatgctgagcggtcagctttcccagttctgatgaggcagcgacaagaagaaaatcaatgtcgtgaaaatctttgccattccatgcattatggacgatttcagttccgtcatgccctagacttaatacactttgggcaaaggagcgtttttgattaaccgcactcaagacggaaatcaaatacgtgacagaaaatgtgatggtaagcagtccttgagctgtttcaataatcgtgacaagcttccataggcctccgttcggagcgaggtcgccatttcctaatgtaaacatgacatagccggaaaaataaattcggtctgaccaggaagccggttcttttgattgagtttccataagtgagtgagggtcactcgagtaaatcaaaacccacccgctccaaaatagactgatccatatcactaacgtcaggcataacagcagaggaccagccatacttagaacctttgcgtggtcaccgctgattttgcggcagcccttccacagccaggcagacaggcatcttgtgatcgggccggcaccgctctctaaccataacgtggtccataaaaaatcaatcatccccgctgtcaataataaaaggcctgcaatgatataaccctcattcattttggttgcctcccttaagtcagccttcttttattttcttctctatttccttttatcctgagtctgaaacaattgaacgaatgtttgattttacagagaaaaataggtgggagttacccaacacttactcatttttcaatatgaacagaaaatcacaagatttttgacttgattcacacattttcatgaagaaaaacgttcattttccccttgaattggtgattttccttttatagagtaaaaaattttcagaaatttatattgactgaaagcgtttttataattatgataatatcagatataacaaaaatgtcactataacatcactacaattgaactattaagtgactaataaataccaaatgaacgaggttatgcacaaagaaatgaccattgttcttttaacgagaaatgaaatcgcttccatagggattgacatgctaagaagaagggaaggttatgaggttattggataaaaacatgaacaactattttctgaagcctgcttacgaaatgtgaggaaggcagcagccctggaataagtttttgacatacgcattttgaaaaagactgggggaaacagtatgaataaacaaggaaatcaaatgtcatttttacgtacaattattttagtctccactttcggcgggcttctttttggctatgataccggtgtgctcaatggagctttgccgtatatgggagagccggatcagcttaatctcaatgccttcacagaaggccttgtcaccagttcacttctttttggagcggcactgggtgctgtgtttggcggcaggatgtctgattttaacggccgccgcaaaaatattttgttcctcgctgttatattttttatttcaacgattgggtgtacgtttgcaccaaatgttacggtcatgattatttcccgttttgtgctcggtattgcggttgggggtgcatccgtaacggtgcctgcctatttagcagagatgtctcctgtggaaagcaggggacggatggtgacgcagaacgaattgatgattgtatcaggacagcttttggcctttgtttttaatgcgatccttggaacaacaatgggagacaactcccatgtgtggaggtttatgctggtcattgcgtcacttccagccttgttcctgtttttcggcatgatcagaatgcccgagagtccccgttggcttgtttctaaaggaagaaaagaagatgctttgcgtgtattgaaaaaaatcagggacgaaaaacgggcagcagctgagctgcaagaaattgaattcgctttcaaaaaagaagaccagcttgaaaaagcgacatttaaagatctttcagtcccatgggtgcgccgtattgtgtttattggattagggattgcgattgtacagcaaattacaggtgtgaattcgattatgtattatgggactgaaattctaagaaattccggtttccaaacggaagccgctttaatcggaaatattgcgaatggcgtgatttcggtattggcaacattcgtcggaatctggctgctgggaagagtggggcgccggccgatgctgatgacaggcttgatcggtacgacaacagcattattgctaatcgggatattctcacttgtacttgaaggatcaccggcacttccgtatgtagtcctgtcattaacggtcacatttcttgcttttcagcagggcgccatttcaccagtgacttggctgatgctatctgaaattttcccgcttcgccttcgcggactgggaatgggtgttacggtattctgtctgtggatggtgaattttgcagtcagtttcacgtttccgatattgctggcagctatcgggctgtccacaacgttctttatcttcgttggattaggaatttgctctgtcttgtttgtgaagaggtttttgccggaaacgaaagggctttcgcttgagcagctggaggaaaacttccgcgcttatgatcacagcggggcaaagaaggattctggggctgaagtgattggataatttaaaaaagaatccgcacccgagtgcggattctttttggtttcaaattagttaggtctaacaaggattttgacttggcttttctctttaataagagccccgaagccttcctcgatcaaatcatctagtacgatttttttcgttacgagtttgtcggctgagaaatagccttctttcattaatgacaatacagccgggaagatgtcgcggtatccgataattccttttactgtacgttctttgattacgatatcgttcggatggatttcagcacctttttcccaaatgctgacgatgacggtttcaccggcaattgtagtggactggatggcttgtcgtaacaccactgggacaccagtgacttcgaatgctacgtcaacaccgcctcctgtacgttctgcaatctcagcgactacatcgtctgttttagacggatcaacgatgatcgcgccaagctcctcagctttttgctggcgttcaggagaaagctcaacagcgtaaatatcagttgcaccggcagccttcagcgcttcaatgacaagaagtccgatcgggccgcagccgaatacagccgctttgtcgcctgctttgagtttgcttgagcggacagcgtatagagcaactgcagaaggttcaacgagcgcgccttgttcatatgataattcatcaggaagtttgaacaaaagctcttcatccacagagacgtattcagagaaaccgccgcctccgccggctaagccgaggaatcccatttgttcatcaaggttgtaggcgccttggtggccgtgtgtagcaaaaatcggctcgactacaacgcggtctccaactttataattttcaacgccttctccgacttcgacaacttcaccggagaattcatgccccattgtgacaggtgccgtttcatttgttaatgggtgcggtttgtcaaccggaataaagatcgggccgcccagatattcgtgtaaatcacttccgcagatgccgcaccatttgactttgatctttacttttcccggctccgtttttggctcttcgatatgttcaatacggatatccttttggttatgccatcttgctgccttcatggattaccactcctataacttttgatgtgagtaattccgcaccggtcaatatgaactgttcacaaaatcgccatttttaaaaccaaaaaagaaatgaaatttttatataatataatctacgtttttttgaaaaaaagaaactttaaagaaaaaagggtctcgcacactcttttttctttatatgagagtatcaatcgtttacatagctatgaatttggtttgaacaatacggtaatggttcgttcatattgaatgcgacaactactctatcaataattataactctaatactgctattataataggataatcttccatggtttattttagcagaggtaacttttttgactttgtaacattactgtaaggatattgaaataaaaaatagctggttgatcgtgtataatcttcctagatgttaacaaacagggggacgaaatgttgaagaaagtcattttagccgcttttatcttagtaggaagtactttgggagcttttagtttttcatcagatgccagtgcgaaacatgtgaacggaaatattacttggtataatggagtcgggaaaaaaggctcttcaggtaagaaacttggacattgggattgtgcgaccaaaatcggatttgatgttcctagaaacgggacaaaaatcagagcttatgcaaaagcgaagcctaaaaaggtgattacggtttataaaaatgatgttggcagaatgcctaatgcagtgctggatgttagccctaaagcgtttaaagcgcttggatacccattaagcaaaggtaaagtagcggggcattacagctattaatgtacatatataatctggaaagcaagaagtcacattcttgctttttctattggtggagataaaagatgaaaaaaagaatcatattattattagcagtgataatagcggcagctgccgcgggggttgcgttttatgttgcaaaggataaaggccatgagaaggctgctgatgtttcagtcaataccgaaagcggtgatgagctgctggtttcaattacagatacggatctgctgacaaagtattatgaaaatgacaaggtgatccatgaggagaagctgaccagctatccggcatttgccttggatcaaaaacagcaggtgctctattatacgggcaataatgaacagaatgaaatgaggctttttaaattggatctgaagtctcataaaaaaacgatgctttataaaggcgcggagagtgcggacagtttatttttatcaaaggaccgttcaaccatctatttccgcttaggaaaagcggacgaaagcaattttcgaatcgccgcttttgatctgaagacgaaaaagtataaaaatctttatcctgccgctaatgatcaggatgacaccgtcagcagcttcttttataaccaaaaaaacgattcatttgcattgcttcattattctgtagaagaagactacaagaaaacagatgaagcaaacgaaaagggcatcgaccctgaaccgacaacgattcattttgcggaaggccgccaaaataaatttaatgagctgaaaagcctgaaccaatttatcagcgatattgctgtttctgatgatgataaacgtattttattcacatcatatacgcaaaaaggaacggagcaaaccgcttctattcaaatgctcaatgcggatacgaaaaaatatgaaagcatcatctcaaatcaaaaatcatttaagctgttaattgacgcacagcctcagttttctaaggatgggaagaacatttattttcttgccgaagccaagggggctaaaaagctgaaggacgaaacagggcgtgaagctaaggtgcggacgatttattcctatagccttgagaataagaccttcaaaaaagtatgggaaaatccgaacggcatcatcaacagcttttttgtgattaactaataaaaaccactcggcatgagctgagtggcttttttaatggatgaggtgcagggctaatgatccgagccatttaaagatatgaatcagaggtaccgacaaaaacagaagttcaacatatgagttcattgcaacattcagctttttgaacgcagctctttttttcaagtctttttgctgctggtttgagatcacgttatcactcctcttatatccatattataccattaaaacagacaaaaaagccctaaacgtttacagttttgggcttctttcttcgtatttggcctcttgcaatgagaggcttttattctgaaatatagaattttgtctccgttcggggtttgtttgcttgcgggagactgcatttgttatagggaagaactagcttgttttcgtttggctgttgttttggagattcactaatgaacggatgccgtcgaccattttacttccgcacaaagggcacaatggcgtatcactgctggcgaagttttttcgggtccagccattacagtcttcttttgtgcattcccaagtactcacatcttcctttggcagcggttcttgatttcgtttgttatagtaagacataaagtcacttcttccctcatgtattttactgcacatttcctattgtctcatacttttccctaatctcctaattcctttttctttatgactttccaataaccccatctaaaaaggagaggagtgtgctgttaaaagcatctggctcttctaaaaacgggcaatggctgcttttaggaaaggtaacgagtgtcgcgtttggaatattgctgcgcaagtgttccccagctgctgtagagaaaaatttcttgtcttccccgaagcacagcaatgccggcacattgatgttttggagggtgccccggtaatcagcggccgtttggttaaataaaatcgtgctagaaatggcagccggctgtttgaggatttctgccagcatccattctgtttcggtctcggcaggcggttctgcgaacatattctggatgaagctttcgtagaaaggcagcgggtcagtttgaatggcgtgcatcgctgtttttaagccgtcaaaatcaaatggaccatgttcccagccctcccattgatagtccgaagcggattgatcgatgatcacagcggcttgaatgttatcattcccaaactgattgagataatcccatacgacaaaagcacccattgaccagccggcaagaacgacatgatcaagctccattgcatttagaaattcccttatgtcacgggcatattgggaaatggtgtggccgtgaagcactttgtcagattcgccgtgtcctctaagatcaagacgaatacattgataattggcagaaagcaccgaaaattgtttgtggaaaaattgtccgctcatcagcaccccatgtataaacaggatcggcgtcccgctcccgtgtgtttcatagtaaaggcgtgtctgatcttctaatatgatgtatggcatgtttctcctcctttagtttccatcatgagtatggctggctgctgttgagctgatgatggcagctgtcgcggctgcctgctgcgcttgaatgactgtttcgatagcggtgtatagtcctgattccatcagcagatttttctccatatgctcactgagatagaggctgacagcaattttaaagttcatttccttttgccatttaaaagctttttcctggtttaattcgtcagtgatgcacaaaacggttttgatatctggctcttccagaaatgtgaggagagcaaggtctggataatgataatcctttgtttttttgacagattcagtgatcgattgatatatctgtttgcaagcggaaacaagcatttcgggctctttttcactttgcaaggccagaatatggctgacctgatgtaagtactgtccttttttaaagccgttggctgccagcagttgatagcatgtttccgccttctgtagcgcctgcaaaccttttccgttttctccaagcagtacggcaagcggaacattctgagttgaagtgaggaaataatgatttttcttcatctgctgataaacagctagccccatgttcatctgttctttttggtttgtcgtttcagatttgccggtgagcaagatcagagcggaaaggtatgtgaacatatcccgcttataccctagcttcaccatttcattgtatacatcgatgaaagtctgaaatgtttgttttgcctcatgctgaaaatgaatgtccagaatagatgcaacagtaaagcggtggtgtgaattgagtgttgagaagctgccgatgtttgatttgatatagctgctcaaatcataaaagcgctgaaaatcaaactctcttttattcacaatatatgcagaagaaatgagcattaatatctgatcgtgtgaaactttccattttaattttgtttttaattcagcataaatggaaatgtaatgctttgttttttcatgtagatcgtgtgtgagcataaaaagcagctccttttgttgtttttacgtaatacgataaatagggccaaaggtttcataaagaaaaaacttgcctgctagaggcaagtttgtcgggttatttatggggatcagttatatccatcggtctcatcatgtcatagtcttcatgctctagaatatggcaatgccatacgtatcgtccgctgtacggaccgaatgtcgccgcgattctcaggacttcacctgcatgcgcttgaatggtgtctttccagcccttttcacttggcggcggcgggacagccggaccggtataggacaattccccgctttcttgataacgggcgatatcaaacggccgccggtctaatacacggaaggagactagatgcaggtggatcggatgtgttccgcgtgtcgggttgataatggaccatatttcagttgtgccgacttttggtgtttctgtgacgggatcgtgccagcgtttgttattaagcagaaggacgggtctgccgtattcgtcctgggtgcctgccagttttaacgttctgatgttttgtattctttcatgctgtaccgaagggtatgaggcgaggtacttcggctttctgctttcgtctttttgtgccaatggttttgtgactctgaattgcatgatattcgcatctgtttcaggattgacgtcaccgccgcagcccgcgctgtttgccaaaatgatcgattctccttcatatgctgtgaagtcaatgatgatatcgtaacgttcagcaggcgcaaggctgaaagaattcagtttaacagatcgcggcaggagccctccatctgaaccaatctgaataaaatctccgccattatcgagtgacaggttataggttcttgtattggaggcgttgatgacacggaatcggtatttccttggctcgacttccaagtatggccataccttcccgttgacgagtatggtttctccgcaaaaagccggaacgattgaaggattaggcagtgacggagaagggttttccggtgcgctcggataaaacaaagaaccatcctcattgatcgtgcggtctgtgataagaagcggcacatcgtattcgtctgaaggcagttttaagcgtttttcctttgggtcatgaatgatatatgcaccgacaagtccggcatagacatttagcctggtgagcgccatggcgtgatcgtgataccacaatatagccccgcgctgctggtttggataatgataaacctctcttttgaaataaggtcctgtttgttcaaagtctttggaaaaccaagcctccggatacccgtcactatcatctggcgtgacgccgccgtgtaaatgaacaacagtctttacctcgggctcttcatgctggctgtcactgtgatgaatggtgtgatcaatcggaaggaaatgcgtggaaggaaggttattcatccattttacatatacgttttcatttcttttaacctcaatggtcggtcccggaaataagccgttgtagccccacaggcgggttggagggagatcgcgatggagctgatgagtgcattcctccatggtgacttcgtagtatgttttttcttttgattgctgtactggctttagtgtatctgggattgggagagcatccacaaatttttcaagtgtcattttcatctgtccttatctaaattttccaaattggtactatagttaatgacaataaggacgtgatggttacaaaaaatcttcgtgctgcagcccgcccgaagaagaaaataacaaaatcctaaacggcaggccgtttaggatttgatcagcattaaggcaggatatcgggttgctgctgtgtgactgggttggcagccgctttctcgctcaccttgcgttttctgaacacaaggtaagaaatcagaacgattcccgtgatgacgcctgtcagcagcagctcgtctctcatggaatcaataaacgccatggacactaaaattccgcaaatggcgatgatggtcaagtaggttaggaaagggaagagccacattttgatcttcaatgcttctgggtttgttttttcgagttttttccgcattttcagctgggaaacggcgatgacaagatagacgagtaaagcgattgcgcctgatgagttgactaagaataaaaagacggtatccggtgaaaaatagttcattacgaccgcgatataagagaaaaatgtcccggccacaatggcttgtacgggaacgccttttttgctcaatttcataaaacggcgcggcgcttcatttctttctgcaagtgaatacagcattctggatgtggtatacaaacctgaattcaggcaagagagtacggctgtgaggacgataaagttcataatctgtgcggctgcgggcactcctatatgctcaagtacagcgacgaaagggctttctaaaatatttgctgaattccatggcaacagcgccacgacaatggcgattgagcccacgtaaaagacgatgatgcgccatacaacggatctggtggcttttgtcacagattcgatcgggttggatgtttcccctgctgcaatggcaacgatttcagttcccataaaagagaagatgacaacgacaatgccgagcaatacggagctgatgccctccgggaaaaatccgcctttgcctgtaagattcgaaaaaccgactggctcactgcccggtgcaaagccaaaaataaaggcaaaaccaacgattagaaaagcaatgatagtcacaactttaatgagggagaaccaatattcaaactcaccgaaagacttaacggagtagacgtttgtcagggtgagcacaatggtcaagatcaaacttgtcagccacagcggaatatcatggaaccagtattgaataatgccagcaccggcaatggcttcgatcgctatgacgatcacccagaaaaaccagtacagccagccgattgtaaatcctgcccacggtccgatggcgtcgtgagcgtattgagaaaacgatccgctcgtcgggtttacggcagacatctcaccgagcattctcataataaaaatcaccaataatccggctaacgcgtaagaaacaacggcacccggaccggtcgagtgaatcactgaaccgctgcctacaaataggccggctccgattacaccggcaatcgaaatcattgtcatatggcgggtctttaattccttttttaatcctgattgagactggttcataagttacctccttttaaaatgcaatcattactgaatattatgataattgaaactctatcataaatatacagtttgtcgaaaattcgtgtaagaaaatataccagcttatttcaaatttgtagtgttttgtttgcgctttcagcgaatgtgtggaaaaaatgtttcgttttttattcgctgtgtgattttgcgtaatatttacaattcgatagaatgcgagaagcactggtgtccttgggtttgatgggatttttggcggagcaaataaattggatgagagaaaaagtgttccttcgtcactatttttctgtggcgggtgaatcatgtttctgtagacccactgcggatcagctttgtaagataataataggaaaatgtgagcgagaggaggttttgtatggagagatatgatgaactgaaaaagggagaatccggagcgctggtcagcattgccgcgtatctagttctttccgcaattaaactgatcatcggttatctttttcactcggaagcacttacggcagacgggttaaataacacaactgacattattgcttctgttgctgtgctgattggcctgcgcatctctcaaaagcctcctgacgaagatcatccatacggccactttcgagcggaaacgattgcatcgcttatcgcatcgtttattatgatggttgtcggactgcaagtgctgttcagcgccggagaatctattttttctgctaaacaagagacgccagatatgattgcggcttggacggcagcgggcggggcagtcctgatgctgatcgtttaccggtacaataaaaggctggccaaaaaggtgaagagccaggcgctccttgctgcggctgctgataataaatcagacgcattcgtcagtatcggcacatttatcggcattgtggctgctcaattccatcttgcttggattgatacggtcactgcgtttgtgatcggtctgcttatttgcaagaccgcatgggatatctttaaagagtcatctcactctttgacagatggattcgacataaaggacatttccgcttataaacagacaatcgaaaaaatctccggtgtgagccgtttaaaagacataaaagcaagatacttgggcagtacggttcatgttgatgtggtggttgaggtatcggcagatttaaatattacggaaagccacgatatagccaatgaaattgagcggagaatgaaggaggagcatgcgattgattattcgcatgttcatatggagcctttagaacaaaaataatggagcttcctgtcacaggaagcttcagcgtgtcgacaaaccctcgcattcgttgtcaggtctgcgcttcggtgctcacgaattagaacattcgctccgctcctatgctcgtccttcctagacttcaagggttttcaatcacgctgaaaagatgacaaaaccctaaaatgaaagccattttaggattttgtcaacaatctggagcttcctgccacaggaagcttttttgtgtgttttggccagctttattggtaacaatttgctagaatcgtttttttatacagattgctttttgtggtaaagttaggttacattatgatgaattttgtagatgactaggaggaaaataatggcatatcaagaagacctgcatcctttgctggggaaagcagttgaacatattaatagagtaatggttggaaaacgagacatcgccatactcagcttagcagcccttcttgccaaagggcatgtgctgcttgaggatgtacccggagtcggaaaaacgatgatggtccgcgcgctggcaaagtcaatcggcgccgatttcaaaagaatccaattcactccggatttgctgccatctgatgtaacaggggtatctatctataatgcgaaaacgatggaatttgaatatcgtcccggcccaattatgggaaatatcgtgctggcagatgaaatcaaccgtacctctccgaagacacagtcggctttgctcgaagcgatggaagaggggagcgtcacggtagatggccatacgatgcagcttgccgatccgttttttgtgatggcaacgcaaaacccggtcgaatatgaagggacctatcctttgccggaagctcagcttgaccgttttttattcaaacttcggatgggttatccgtcctttaatgaagagcttgacgtcttatctcttcaggaaaaaagccatccgattgagacgcttgagccggttattgcaaaagaagacttcatctttttacagagggaagtgcaaaatgtccgtgctgatgacagcattaaggaatatatcgttgaaattgtgcagaaaacgagacagcatccttctgttcaattaggcgtcagtccgcgcggctcaatcgccctcatgaaagcggcacaggcatacgcgctgctgcatcatcgcgactatgtcataccggatgatattcaatatttagctcctttcacgctgccgcaccggatgatgcttcatcctgaggcaaaatttgaagggattcaggcagaagcgatcgtaagggagatcatgtcagctgtgaaggtgccggttcaaaggtcggcggtccgctgatgaataagaaatggcaatggctcgtatatggttggaagctgattatattaactttattgacggctgctgttttttcttatgcgatgtttcagggcggctttgtcagctggtttttgttttacgcgtttctcccttttgtcttgtatgccgggctgttggccttgtatccgctccgttcttttcaggcttcaaggcaaatggataaaacacaattgcatgcgggggacaggctgggcgtaacggttacgctgagaagaaagctgccatttccgctgatgtatatggtgattgaagattgcctgccagaaggtatcgagtcattaaatcgagacggagccgcggccaaacggctcgtttttccttggtttaaacggagcatgacgatgtcgtatgaattagctcgggtaccgcgcggagagcatcactttcattctgtcagggtgcgaaccggggatgttcttggcttgattgaaaaaacagcattttttgagctggatgataccttgtttgtttatccattctatcagcgtttttcctatcaggtgaatgagaggcatcaggaagacggtgtaagcggttcttctcctattcatcagcaccattcctcagtcgcagcaagtgtgcggaattatcagccgggagaccggtttgctgcgttagattggaagacatctgcacggcggagccagctgatgacgaaggaatttgagccttctcgcagcaaaaatctgtttctgctgatggaccgtttttcctcagacgcattcgaagaggtcgtttcagtgacagcttcgattcttcattctgttttaaaaaacggcgcgggtgctggtctggcttccatcgggaaggaaaaaaacattttccctattcaggaaggggatcagcattttaagcacatgcttcggcatttagccatcgctcattgtgatgcggcagacccgataagccgatatgcacgggaagagctgggaaagccatctgttcgccaagctgatcaagttgttgtcacgggacagttaacggaagatatgctgcacctcgcagaaataggaggcggccgggttacggtgatactggcaaaagagaaagatgctgagctctctcaagctgaaaatgtcatgattgaacgcatgatgaaacgccaaatcagagttcggatcatgaggggcgggcgagtttcgcgtgttgtttagaaagagaggtgactggttcacatgccgcacgatgatcacaagggaagccgtttgagcttgctgttattttattttctggcttttttattgctgtgggagtggcttaggccgcttgacagttttactgaaacgaaacatacaggcttttttagtgtctttatcggcttgacgtttctgctgacttttttcaggatgaggtggtttgtcaccgttcctttttgtgtcatatttacattgatctcgatacacatcctgttttatcaaggatctatattcgacttgagctgggtcagctcttttttgcaggatgtctatctgaatatcacgctgattcaatcagggcaatggaatgacatgattccttcatttcggaccctgctgttttttgtgctgctgtggctgctggtctatctcctgcattattgggtgatttaccagagaagaattttgtttttctttttgatgacagtagcgtatattacgattcttgatacctttacgccatatgatgccacttttgccgtaatccgtatcgtgctgatcggcttctttatgctgggccttttatacttggaacgcattaagctgatggaaagaatcacactgccaaaaacatctgtcctgaaatggtttcttcctttatctgtattggttttggctgcaacgggattcggactcgccgctccaaaatcagagccggcttggcctgatccggtgccttttcttaaaaaaatcactcatcaagaccgcgtgtctgcaggggaaagcaaaatcggatacgggaatcatgatgaatcactcggcggcccgttccagcaggatgctacacctgtttttacatggcagggaaaagagcgtacgtatttccgtgtggaaacgaaggacacgtataccggaaaaggctggattgaaacagacacaggcatgtcgtatcagcttagcaatggaaaagttgaaaatctgtggtttgaccataaggttgcgacagagcgccgcaccgtccgtgtaaaagtcgataagcactacgggtataaccatctgatgtatccgattggtgcggaaaccattcagccaaagcaggctgtctcacttgaaatgaacggcaacacggagcaaatttctccgatcagtgaacaagccggtgaaatcagaaatatggggaattatacagtaacgtacaattccccggtctataagctggatgaactgagaaaggtaaaagtgagaaaaaacagtgaggagtacacattcagcgatcgctacatgcagcttccagattcactgccagagcgggtgagaacccttgcgatcaaactgactcaggatcacgacaatatgtttgataaggtgaaagcggttgaggactatttagggtcaaatgcgttcacatatgaaacagaaaacgtgaccattccgaagaatgatgaagattatgtcgatcaatttctctttgaaacgaaaatgggttattgtgataacttttcttccgccatggtggtgctcttgcgctcggccggcattccggcccgctgggtaaagggttatacgtccggcgaatacaaagaagcagggaacaaaaatggcagcatttacgaagtgacaaataacaatgcccattcctgggtagaggtgtatttcccggaacagggctgggttacatttgagccgactaaagggtttacaaatccggctcaatttacatcttctgacacaaaagactctggcagcgatagcagcagctcgccgaagaaagcaaaagagaaacagaaagaagagaaaaaacagccgcaaaaagaggaaaaacaaaaggaaaagcgggagccagctgtttctaaaaagccgtccgcttcgcatactaatgccggtgcgggcttgtatgcagcgcttgcggttcttgcagtcctcctggtggcagctgtattgctgtatgttttccgctcgttatggattcctgttttcgccgtgaggaaattgaagcggcgcagtgatcagcacgcgttttttgaggcatatggcgcgctgctgaaacaactgaagagaaaaggactgccgaaacgagacagtgaaacgctgcgtgattatgcaaaacgaattgatgaaaaatacgacatagaagacatgtcaaagctgacattaagctatgaaagggcgctttacagaaatgaagattcttcggcgctatggaatgattcgagagagttatgggaaaatttaattaaaagaagatggtcttgaccgcttatcgacgtgttgttagaattagtgaatattatcggagtctgggagcgagttggcctgactccggcaaacggccttgccaaagagggcggagcgagcttcatatctgtcctcgtttttttctgtgtcaaaaaacttagaggagattaggtgacaaccatgacaaagttagtgaatgaaatgattcttgtccttgatttcggcagtcagtataaccagctgattacacgccgtatccgtgaattcggtgtttacagcgagctgcatccacatacattgacggctgaagaaattaaaaaaatgaatccaaaaggaattattttatccggcggtccaaacagtgtgtatgatgaaaactctttccgctgtgacgagaaaatcttcgagcttgatattcctgttttgggaatttgctacggcatgcagctgatgactcattaccttggcggtaaagttgaagcggcaagccagcgtgaatacggaaaagcaaacatccgcatcgaaggcacacctgatttgttcagagatcttccgaatgaacaagtggtttggatgagccacggcgatttggttgtagaagttcctgaaggcttcactgttgacgcgacaagccatcactgcccgaactcagcaatgagcaaagcggacaaaaaatggtatggcgttcagttccacccggaagtgcgccactctgaatacggcaatgatcttctgaaaaactttgtattcggtgtttgcgaatgcgaaggcgaatggtcaatggagaactttatcgaaatcgaaatgcaaaaaatccgtgaaacggtcggagacaaacaggttctttgcgcgctaagcggcggcgttgattcctctgttgttgctgttttgattcataaagcgatcggcgaccagctgacttgtatctttgtagaccatggtcttctccgtaaaggcgaagctgagggtgttatgaaaacattcagcgaaggctttaacatgaatgtgattaaagtagacgcaaaagatcgattcttaaacaaactaaaaggcgtttctgatcctgagcaaaaacgcaaaatcatcggtaatgaattcatttacgtgtttgatgatgaagcggacaagctcaaaggcatcgactaccttgcacaaggtacgctttacacagatatcatcgagagcggtacagcaacggcgcaaacgatcaaatctcaccacaatgtcggcggacttcctgaagacatgcagtttgagctgatcgagccgttaaatacgctcttcaaagacgaagtgcgcgcgcttggcacagagctcggcattccggatgaaatcgtatggcgtcagccgttcccaggaccgggactcggaatccgcgttcttggcgaagtaacagaagaaaaacttgaaatcgttcgtgaatcagatgcaatcttgcgtgaagaaattgcaaatcacggcttagagcgtgatatctggcaatacttcactgttcttcctgacatccgcagcgttggtgttatgggtgacgcaagaacatatgattacacaatcggaatccgcgccgttacatcaatcgacggcatgacatctgactgggcgcgtatcccgtgggatgtgcttgaagtcatttcgacacgtatcgtaaacgaagtgaagcacattaaccgcgtggtgtatgatattacaagtaagccgcctgcgacgattgagtgggaataagaatcaattaatggaaaccatctttttggcaattttgccgggaagatggttttatttgtttattacgaacaaaatccgattttgcgcgactattgttcgctttttgtattgttttttcaaaatgaacttggtacaatagacacagaaatcaaataagatgaattcgtataatcgcgggaatatggctcgcaagtctctaccaagctaccgtaaatggcttgactacgtaaacatttctttcgtttgatataaataaaacacggttatttattcaaactgaaatccgtctgtagtcaagcgtcccaaaatgtattgggacgttttttatttggcgttttcaggacagaataaatagcaaagagtgaagggagtcaaatagcttgaaaacgttttttcagtttgatgagctgggcaccagctatcgcaatgaaatcattggcggattaacgacttttttatctatggcatatattttgttcgtcaatccgattacgcttgctttggagagcgtgaaagattttccggaggcgctgagaattgaccagggtgcggtctttacggcgacagcgctggcgtctgcagcaggctgtatcttaatgggattaatagcgagatatccgattgccatcgcgccgggtatggggctgaacgcgttttttgcgttttctgttgtccttggtatgggtatttcatggcaggcagctttgtccggtgtttttatttcaggtcttattttcgttgctctttctttaacaggttttcgtgaaaaaatcatcaacgccattccgcctgagctgaaattggcagtcggtgcggggatcggcctgtttattacatttgttggattacaaggttcaggaatcattacagcgaatccttctacgctcgtcacgatcggaaacattcacagcggtcctgtgctgttaacgattttcggtgtgattgtcacggttattttaatggtgcttcgcgtgaacgcaggcgtgtttatcgggatgctattaacagcggtagccggcatgattttcggtttggttccggttccgactcaaattatcggcagtgtgccaagccttgcgccgactttcggacaagcgtggattcacctcccggatattttctctgtacaaatgctgatcgttattttaacattcttgtttgtcggattttttgatacagctggtacacttgttgctgtggcaacacaagctggtttaatgaaggaaaacaaattgccgcgtgcgggccgtgcgcttttagctgattcatcttctattgtgatcggtgccgtgcttggtacgtctacaacaacttcttacgtggaatcaagctcaggtgtcgctgcgggtgcccggtcaggatttgccgcaattgtaacagggattctctttttactggctacgtttttctcgccgctcctatcagtcgttacgtcaaatgtaacagcgccggcgcttattattgttggtgcattgatggtggcgccgcttggcaaaatcgcttgggataagttcgaagtggccgttcctgctttccttaccatgatcatgatgccgttaacgtacagcatcgcgactggtattgccatcggatttattttctatccgattacaatggtgtgcaaaggaaaagcaaaagaggttcatccaatcatgtacgggctgtttgtcgtatttatcctgtactttatcttcttaaaataaggaatgaaaaaccagctgcactggcagctggtttttttgttgcaaaagataaaaccatttcatacgatataccgtcatgtagatgtgccgccatgctttacttaaatggaaatgacttgactgttcaggaaggcttcggtaccttatataagtgttttattttcttgctgaatggtattccgccgtatttttttgataggagttgctgacatgacggaagaaagaaaagaaacgtttgaagaagaaattaaccagagtgaaagaatagatgcagatgaagaaccgctatcgagaatgtccagaaaggcgagccggcaaagcaagcagaagcaaaaacaaaagcagaaaccgcgccaggaacgcggtgaatcaactgttaaagacaagcttgcgtctgtttgggcagccatcaacagatattgcggttttgcgttctcgattttaaaatctccggcgaaaactgtcgtaacggatggtttttctcattataagtacggtctgatttcaatgcttatattcagtatcattttttcaattgggaattggtttcagttaaaggcaagctggaatcggccgctcggtttcggagaacgccatcatgctttctatgacgggtttttagttgttcttgtgtatttgctgatctttttcgcggtaatggtctttgctatatgggctgtctcccgctatatgatgaagcagaaggtgacgttcagagaagcggctgccgtattgggttcattgcttgtacccgtaattgctgtttcaatcctttggctgatctttgcgatcgtaaatatcccaatgctgacagtactgtttacggtgctgatcttgttttccatcttttttatcatcgcgctgtatgtacagcgtgtgtaccaggcggcacaagatgcaccaattgattatatctattgtgtatttgcagtagttgcgatagcgctgctgtttacggcagtgacttggccgtttatttctgaatatattacggcgtcgttgattccgctttaatgaaaaaaccggctaatcctagccggtttttttatgtcacactttttacaaatatatctaaaaaacatagttgatttgtaggattaacccgtgtatgatggggaaaatgctgaaaacgtccagcgcaaaaacctttatgtttaaggaggatgatggacatggctgatgtacttcgccgagcaattaaccaaaagaagcaatttttaaaaaccaaattactgctctcggaattttatcaaggaagaggggaacagcttgctgactacacgctgagtgagcttgagaaagaatacaagtcccttcagaaaatgaaaaaagagatctgacaatagatataaagaggtgagtctgctgaaaagcgggcttttttgttttgattttgaaaaggcgagaaagagggtaaactactactgttcaacacataaaagcgtgtcgaaatattttgcttaagcttacgggcgaagctgattgtaaacggctcatttctctagtagaatatgaatgctttgtgcaagctgaagagtagggggatgaataaaatgatgcaaaccatcttatcaaatgggatagccatggttctcataattctcattattaatattgtctatgtgtcattttttacgataagaatgattttaacgctgaaaggacagcgttatttagcggccggcatcagtacgattgaaatactggtttatgtgacaggactgagtctggtgctcgataacttagaccagattcaaaatgtgatcgcgtacgcgctcggttacggtcttggcgtaattgtcggcatgaaaatagaagaaaaattggcgcttggctatattatggtcaatgtgattacgaaggagctcgatcttgatcttccgaagcagctccgtgaaaaaggctacggcgtgacaaactgggtggcaggcgggcttgaaggcgaccgcacagcccttcagatcctgacgccgagaagatatgaactccagctatatgatacgattaaaacacttgattcaaaagcctttattattgcgtacgaaccaaaaacaatccacggcggcttctgggtcaaagcggtgaagaagaggagaattaaagaataatggcaaagccgaagaagaaaaagtttgaagtgacagagcagcaaacgattgatgcggtgcttcagcaaatgaaagaagaaggatatctgcctgtaaggcgaatggaagagcctatttttatggaaaaaaaggaaaatgggtcaattcagatcgttccgtgcgggaaaaaaatcgtatttgaagggaaattgatctaaaacacgaacattagtagaatgaatttttgtatcgttcgataatatcgttgacattatccatgtccgttgttaagataaacatgaaatcaaaacacgacctcatataatcttgggaatatggcccataagtttctacccggcaaccgtaaattgccggactatgcaggaaagtgatcgataaaactgacatggatatatcgcagaagcgaacgactgacgatacatgtaccatgcccggtttgtattgcttcctcataagtgcaatgcagagcgggtattttttattttctgaaaacaaaagcattagaaggtggggaacagaatgcagccgctagtaggaatcatcatgggaagcacttccgattgggagacaatgaaacacgcatgcgacatacttgacgaactcaatgttccgtacgaaaaaaaggtcgtttccgctcaccggacgcctgatttcatgtttgaatatgctgaaactgctagagaaagaggcatcaaggtgattattgccggtgccggaggagcggcgcatctgccagggatgacggctgcgaaaacaacactgccagtcattggagttccggttcagtccaaggcgctgaacggaatggattcacttctttccatcgtccaaatgcctggaggcgtgcctgttgcgacaacatccatcggcaaagcgggtgctgtgaacgcaggcctgttagcggcgcaaattttgtcagcatttgacgaagaccttgcccgtaagctggatgagagaagagaaaatacaaaacagacagtgttagaaagcagtgatcagcttgtctaaacaaatcatctatccgggagctgtaatcggcattatcggcggcggccagcttgggaaaatgatggctgtgtccgccaaacaaatggggtataaagtcgcggtcgttgatccggtgaaagattcgccgtgcgggcaggttgcggatgtcgaaattaccgctcattataatgaccgtgaagcgattcgaaaattggctgaaatcagcgatatcatcacatatgagtttgaaaacatcgactatgatgcgctgcattggctaaaagatcatgcgtatctcccgcaaggaagtgagctgctgcttattacccaaaaccgtgaaacagagaaaaaagcaattcaatccgcgggctgtgaagtcgcaccgtacagcatcgtcaaaacaaagaatgaattgaaacaggcagtacaggagctcaggcttccggcagtgctgaaaacatgccgcggcgggtacgacggcaaaggccaatttgtgataaaagaagaggcgcaaatggagcaggcagccgctctgttagaacacggaacttgcattcttgaaagctgggtttcttttaaaatggaactgtcggtgatcgtcgttagatcggtaaacggtgaaatttcaacatttccgacagctgaaaacattcaccacaacaatattcttttccaaagcatcgtgcccgcacgggtagagaaagggattcagcagaaggctgctgatctcgcagttaagcttgcagatgagcttaaccttgtcggaccgcttgctgttgagatgttcctgacagaggacggagagcttttggtcaatgaactggcgccaagaccgcacaattcagggcattatacgctggacctttgcgagacgagccagtttgagcagcatatcagagcggtatgcgggcttccgcttgggaagacagatttgctgaagccgggcatgatggtgaatcttctcggcgatgaagtgaagcttgttgaggaagacccggagcttttaaaagaggcaaagctatatatatacggaaaacatgaaatcaaaaaaggccgcaaaatggggcatattacatttatgaagcagcctgaagacgaatggattcaggagatcacaaataaatggatgaatagagacggaggacaagcagaatgatcgaacgttattcaagacctgaaatgtccgcgatttggacggatgaaaacagatttcaagcatggttagaggttgaaattcttgcctgtgaagcgtgggcggagcttggcgtcattccgaaagaagatgtaaaggttatgcgcgaaaacgcgtcatttgacatcaaccgcattttagaaatcgaaaaggacacgcgccatgacgttgtcgcttttacgcgcgctgtatccgaatcactgggcgaagaaagaaaatgggtgcattacggcttaacgtcaactgacgttgttgatacggctctttcctacttattaaaacaggcaaacgatattttgctcaaggatcttgagagatttgttgacattataaaagaaaaagcgaaagaacataaatacacagtcatgatggggcgcacacacggcgtacacgctgagcctacaacattcggcttaaaacttgcgctttggcatgaagaaatgaaacgtaatcttgagcgcttcaaacaagcgaaagcaggcatcgaggttggaaagatttccggtgctgtcggcacatatgcgaacattgatccatttgttgaacaatatgtctgtgagaagctcggattgaaagcagcaccgatttccactcaaacccttcagcgtgaccgccatgctgactatatggcaacacttgctttgatcgcgacaagcatcgagaaattcgctgtggaaatccgcggactgcaaaagagtgaaacacgtgaagtagaggaatttttcgcgaaagggcaaaagggttcatctgcaatgccgcataaacgaaatccgattggctctgaaaacatgacaggcatggcgcgcgtgatccgcggctacatgatgacagcttacgaaaatgttccattatggcatgagcgcgatatttctcattcttcagcagaacgaattattcttccggatgcgacaattgcgctgaactacatgctgaaccgcttctccaacatcgtgaagaacttaacggtcttcccggaaaacatgaagcgcaacatggaccgcactctcggccttatctattctcagcgtgtgctccttgctttgattgacacaggcctgactcgtgaagaagcctatgatacagttcagccgaaagcaatggaagcgtgggaaaaacaagtgccgttccgcgagcttgtggaagcggaagagaaaatcacgtcacgtctttctccagaaaaaattgctgactgctttgattacaattaccatctgaaaaatgttgatctgatctttgaacgtttaggtttagcatagaagaagcttttagcggcttcttctaagccgccgcagtttgaaaattcccaacattcgggttaggaggccttccgtgaatattgtgaagaatgaacttttatacgaaggaaaagcaaaaaagatctacaaaaccgatgacgaaaacacgctgtatgtcgtgtataaagactccgccactgcctttaacggcgagaaaaaagcagaaatcagcggaaaagggcgcttaaataatgaaatttcaagcctcattttcaaacaccttcatgctaagggcattaacaatcattttatcgagcgcatttcggaaacggagcagctcattaaaaaggtaacgattgtgccgcttgaagtcgtggtaagaaatgttgtggcaggaagcatgtccaaacgtctcggcattccagaaggcacggagcttgagcagccgattatcgagttttactacaaggatgacgcgctgggtgatccgctcatcacagaagatcatatttggcttttgaaggcggcgactcctgagcaggtagaaaccattaagtccattacaacaatagtaaatgaagagcttcaaagcatcttcgacgattgtcatgtcagattaatagatttcaagcttgaattcggtttagatgcagaagggcaagtgcttttggcggatgaaatatctcctgacacatgccgcttgtgggataaagaaacgaacgaaaagctggacaaagatttattcagacgcaatctgggaagcttaaccgacgcatacgaagagattttcaatagactgggaggcattcatcatgtataaagtaaaagtttatgtcagcttaaaagaaagtgtactagatccacaagggagcgctgtccagcatgccttgcacagtatgacttacaacgaagttcaagatgtgcgcatcgggaaatacatggagcttaccattgaaaaatctgaccgtgatcttgacgtgctagtgaaagaaatgtgcgaaaaacttcttgcgaacacagtgattgaagattatagatatgaggttgaggaggtagtcgcacagtgaaatttgcggtgattgtgttacccggctccaactgtgatatcgatatgtatcatgctgtaaaggatgagctcggccatgaagtggaatacgtctggcatgaggaaacaagccttgacggcttcgacggcgtgttaattccgggaggattttcttacggcgattacttaagatgcggcgccatcgcccgatttgcgaatattatgccagctgtcaaacaagcagcggctgaaggaaaacctgttcttggcgtctgtaacggattccagattttacaggagcttgggctgctgccaggcgcaatgagacgcaacaaagatctgaagttcatttgccgtccggttgaattgattgttcagaacgacgaaaccttattcacagcttcctacgaaaagggagaatcgattacaatcccggttgcccatggtgaagggaatttctactgtgatgacgagacgcttgctacattaaaggaaaacaatcaaattgctttcacatacggctctaatattaatggaagtgtcagcgacattgccggtgtcgtgaatgagaaaggcaatgtattaggcatgatgcctcaccctgagcgcgcggtcgatgaactgcttggaagcgccgacggtcttaaattgttccagtctatcgtgaaaaattggagggaaactcatgtcactactgcttgaaccaagtaaagaacaaataaaagaagagaaactgtatcagcaaatgggtgtcagtgatgatgagtttgcattgatagaatccattcttggaagattgccgaactacacagaaatcggaattttttctgtcatgtggtctgagcattgcagctataaaaactcaaagccgattctgcgtaaattcccgacaagcggcgagcgtgtgctgcaggggccgggggaaggcgccggaatcgttgatatcggtgataaccaagcggttgtgttcaaaattgaatcacataaccacccatcagctctcgagccttaccaaggcgctgcgactggcgtaggcggaattatccgtgatgtattctcaatgggtgcacgcccaatcgctgtattgaactctcttcgatttggtgaactgacttcaccccgcgtgaagtacttgtttgaagaagtagtagcgggtatcgccggatacggcaactgtatcggcatcccgacagtcggcggagaagtgcagtttgacagcagctatgaaggaaatccgctcgtcaacgcaatgtgcgtcggtttaatcaaccatgaagacatcaaaaaaggccaggcaaagggtgtcggcaacacagtaatgtacgtaggagcgaaaacagggcgtgacggcatccacggcgctacgtttgcttctgaagaaatgtcagactcgtctgaagaaaagcgttctgctgtccaagtcggcgatccgtttatggagaagcttttgcttgaagcatgtctggaagtcatccaatgcgacgccttagtcggcattcaggatatgggagctgccggtttaacaagctcaagtgcagaaatggcaagtaaagccggttctggcattgaaatgaatcttgacctgattcctcagcgcgaaacaggcatgaccgcgtatgaaatgatgctttctgaatcacaagaacggatgcttttggttattgagcgcggacgtgagcaggaaatcatcgatatttttgacaagtatgatcttgaagcggtttctgtcggacatgtgacagatgataaaatgcttcgcctgacacataaaggagaggttgtgtgcgagctgcctgttgatgccttggcagaagaagcaccggtttaccataagccttctcaagagcctgcttactatcgcgagtttttggaaacagacgttccggctccgcaaattgaagatgcgaatgaaatgctgaaggcccttcttcagcagccgacgattgcgagtaaagagtgggtttatgatcagtatgactacatggtgcgcacgaatacagttgtcgctcctgggtctgatgctggtgttctcagaatccgcggaacgaaaaaggcgctggcgatgacgacagactgtaacgcgcgttatctctatcttgatcctgaagtcggagggaaaattgctgtcgctgaagcagcgcgcaacatcatttgctcaggcgcagaaccgcttgcggtgacagataaccttaacttcggaaaccctgagaagccggaaatcttctggcagatcgaaaaagcggcagacggcataagcgaagcgtgcaatgttctcagcactccggttatcggcggtaacgtatcgctttataacgaatcaaacggcacggcgatctatccgacaccagttatcggcatggtcggcctaattgaagatacagcgcacattacaacacagcatttcaaacaagcaggagatctcgtatacgtgatcggcgaaacaaaaccagagtttgccggaagcgagctgcaaaaaatgacagaaggccgtatttacggcaaagcgccgcaaatcgatcttgatgtagagctgtctcgtcaaaaagcactgcttgacgcgattaaaaaaggcttcgttcaatctgcgcatgatgtgtctgaaggcggcttaggcgtagcgattgcggaaagtgtcatgacgacggaaaaccttggcgctaatgtgactgtagaaggggaagcggcgttattattctctgaatctcaatctcgcttcgtcgtttcagtgaaaaaagaacatcaagctgcgtttgaagcaactgtcaaagatgcagttcatattggtgaggtaacagctgacggaattctggcgattcaaaaccaagacggacaacaaatgattcatgcgcaaacgaaagagcttgaacgcgtatggaaaggagctatcccatgcttgctgaaatcaaaggcttaaatgaagaatgcggcgtttttgggatttggggacatgaagaagccccgcaaatcacgtattacggtctccacagccttcagcaccgaggacaggagggtgctggcatcgtagcgactgacggtgaaaagctgacggctcacaaaggccaaggtctgatcactgaagtatttcaaaacggcgaactcagcaaagtaaagggaaaaggcgctatcgggcacgttcggtacgcaacggctggaggcggcggatacgaaaatgttcagccgctcctcttccgttcccaaaacaacggcagcctggcgcttgctcataacggaaatcttgtcaacgccactcagctgaagcagcagctcgaaaatcaagggagcatctttcaaacctcttcggatacagaggttttggctcacctgatcaaaagaagcggacacttcacgctgaaggatcaaattaaaaactcgctttctatgctgaaaggcgcctacgcgttcctgatcatgaccgaaacagaaatgattgtcgcacttgatccaaacgggctgagaccgctatccatcggcatgatgggcgacgcttatgtggtcgcatcagaaacatgcgcatttgacgtcgtcggcgcaacgtaccttcgcgaggtagagccgggagaaatgctgatcattaatgatgaaggcatgaaatcagagcgtttttccatgaatatcaatcgttccatttgcagcatggagtacatttatttctccagaccagacagcaatattgacggtattaatgtgcacagtgcccgtaaaaaccttgggaaaatgctggctcaggaatccgcagttgaagctgacgtcgtaaccggggttccggattccagtatttcagcggcgatcggctatgcagaggcaacaggcattccgtatgagcttggcttaatcaaaaaccgttatgttggcagaacgtttattcagccgtcccaggctctgcgtgagcaaggcgtcagaatgaagctgtctgcggtgcgcggggttgtagaaggcaaacgcgtcgtgatggtggatgactctatcgtgcgaggaacaactagccgccggattgtcacgatgctaagagaagcgggtgcgacagaggtgcatgtgaaaatcagttcaccgccgatcgctcatccgtgcttttacggcattgacacttccacacatgaagaactgatcgcgtcttcgcattctgttgaagaaatccgtcaggaaatcggagccgataccctctcatttttgagtgtggaagggctgctgaaaggcatcggcagaaaatacgatgactcgaattgcggacagtgtctcgcttgctttacaggaaaatatccgactgaaatttaccaggatacagtgcttcctcacgtaaaagaagcagtattaaccaaataaaacttgaaaaatgacataaaggcagcgcagttcggctgcctttctctttctgccctcgttcggggagatattttgaaaagcgccttaaaggagtgaataggatgtctgaagcatataaaaacgcaggagttgacatcgaagccggatatgaagctgtaaaacgaatgaaaaaacacgtggagcgcacgaaacggcttggcgttatgggcagccttggcggttttggcggcatgtttgacctgtctgagctttcttatcaaaaaccagttctcatttcgggaacggacggtgtcggcacaaaattaaagctcgctttttccatggataagcatgacacgattggcgtggatgctgttgcaatgtgtgtcaatgacgtgctggcacaaggtgcagagccgctgtttttcctcgattatttagcggttggcaaagcggacccagtgaaaattgaacagattgtacaaggtgttgcggaaggctgtgagcagtcaggttcagccttagtcggcggtgaaacggctgaaatgccggggctctatacagctgatgaatacgatattgccggtttctcagtcggagtggcagaaaaggacgaaatcgtgactggagaaaaaattgaagagggccatctgttgatcggcctcagctccagcggccttcacagcaacggcttttcccttgtcagaaaagtgcttctggatgatgcggagctggacctcgatacaacatatgagccgtttgaacgcccgcttggcgaggaattgcttgaaccgacaaggatttacgtgaagcctgtgcttgccgcggtcaaaagcggaaaaatcgacggcatggcgcacgtgacaggcggaggatttattgaaaatattccgcgtatgcttccggaaggcttaagtgcggaaattgatcatggctcatggccgatcccgccgattttttctttcttgcaagagtacggcaagctaaaggaagaagacatgttcaacgtctttaatatgggtatcggttttgttttggcagtcaaagaagagcatctgacagatgtgatcggaacgcttgaaagccatggcgaaaaagcctatttaatcgggcgtgtgaaaaaaggtgaaggcgtcacattcggcggtgcggcactttcatgaaaaagtttgcggtatttgcatcaggaaacggttcaaacttcgaagccatcgtcacgcgtttgaaggaggagaactgggatgcgtcagcagcgctcctcgtttgcgacaaaccgcaggcgaaagtcatcgaacgggcggaagcattccacattccatccttcgcatttgagccgaagtcttatgaaaacaaggctgcatttgaacaagccatcattgaacagcttcgtcttcacgaggttgaattgattgctcttgccggctatatgaggctgatcggtgatacgctccttcaagcatatgggggaaaaatcattaacattcacccatcgcttcttccggcgtttcctggaatcgacgcagtcggacaggcgttccgggcgggtgtgaaggtggccggaatcaccgtgcattatgtcgatgaaggaatggatacaggtccgatcatcgctcaaaaggcaatcgaaattgatgaacatgatacattggaaacaatcgaacagcgaattcacaagcttgagcataaatggtatccgagtgtgattaaacagctattaggattaaataacagaggtgaaaaggcatgaccattaaacgtgcattaatcagtgtttcagataaaacaaatctcgttcctttcgtaaaagaactgacagagcttggcgttgaagtcatctccacaggcggaacgaaaaagcttcttcaagaaaacggtgtggatgtgatcggaatttctgaagtgacaggctttcctgaaattatggacggccggttaaaaaccctacacccgaatattcacggcggccttctggcggttcgcggcaatgaagagcatatggcgcagatcaatgaacacgggattcagccgattgacctcgttgtcgtcaacctctatccatttaaagaaacgatttctaaagaagacgtcacgtatgaagaagcgatcgaaaatatcgacatcggcggacctggcatgctgcgcgcggcatcaaagaaccatcaggatgtcacggttatcgtcgatccggccgattacagcccagtgctaaatcaaatcaaagaagaaggcagcgtatctcttcagaaaaaacgcgagctcgcggcaaaagtattccgtcatactgcggcatatgatgcactgatcgctgactatctgacaaatgttgtcggtgaaaaagaaccagagcaattcactgtgacatttgagaaaaaacaatcgcttcgctatggagaaaacccgcatcaggaagcaactttctatcaaacagctcttcctgtcaaaggctccattgcgcaagcagaacagcttcacggaaaagagctttcttacaacaacattaaagacgcggatgctgcagttcaaatcgttcgtgaattcactgaaccggctgctgttgctgtgaagcatatgaacccgtgcggcgtgggaacaggaaaaacgatcgcagaagcgtttgacagagcgtttgaagcggataaaacatctatcttcggcggcattatcgcgctgaaccgtgaagtggacaaggcaactgccgaagcgcttcacaacattttcttagaaatcatcattgcgccttcattcagccaagaagcgctcgacgtcctgactgcgaagaaaaatctccgtctgctgacgcttgacgtatccgccgctgttcaaaaggaaaaacagctgacatccgttcaaggcgggctgctgattcaagatttagatatgcacggcttcgatgatgctgagattagcattccgacaaaaagagagccgaacgagcaagagtgggaagacttgaagcttgcttggaaagtcgtgaagcatgtgaaatcaaatgcgattgttctcgcgaaggacaacatgacagtcggcgtgggagcaggccaaatgaaccgcgtcggatcggcaaaaatcgcaatcgagcaagcaggggaaaaagcgaagggcagcgcgctcggttcggatgcatatttcccaatgccagatactgtcgaagaagcggcaaaagcgggcgttacagccatcattcagccaggcggatcgatccgagatgaggattccatcaaaaaagcggatgaatacggcattgccatggtattcaccggcatcagacacttcaaacattaaggggatgaaaacgacgtgaatgtattaattatcggtaaaggcggaagagaacatacgctggcgtggaaggcagcgcaaagcagcctcgtcgagaatgtatttgccgctcccggaaatgacggcatggcagcttccgctcagcttgtaaacattgaggaaagcgaccacgcagggcttgtctcatttgcaaaacaaaatcaggtcggcctgaccattgtcggccctgaggttcctttaattgaaggtctggtggatgaattcgaaaaagcgggcttacatgtgttcggtccgtcaaaagctgcggcgatcatcgaaggaagcaaacagttcgctaaggatttaatgaagaaatacgacattccgaccgcagaatacgagacgtttacatcctttgatgaggcgaaggcatatgtgcaggaaaaaggtgctccgattgtgataaaagcagatggacttgcagctggaaaaggcgttactgtggctatgacagaggaagaagcaattgcgtgcttgcatgactttcttgaagatgaaaagttcggtgatgcgagcgcgtccgttgtcattgaagaatatctttctggtgaagaattttctctaatggcctttgtcaaaggggaaaaggtgtatccgatggtgattgcccaggatcacaagcgggcgtttgacggagacaaaggcccgaatacaggcggcatgggcgcctactcgccagttccgcaaatttcggaagaaacggtccgccatgctgtagaaacgatcgttaagccggctgcaaaagcaatggtacaagaaggccgttccttcactggcgttttgtacgctggattgatgcttactgaaaacggctcgaaggtcattgaatttaatgcccgtttcggcgatccggaaacacaggtcgtgcttccgcgcatggaatctgatctggtacaggtgcttcttgatcttttagatgataaggaagttgacttaagatggaaggataccgcggcagtgagtgttgtgcttgcatcagaagggtatccggaaagctatgcaaaaggcacgccgatcggcagccttgcagcagaaactgagcaggtcgtggtcttccatgccggaacgaaagcagaaggtggagagttcgttacaaacggggggcgcgtcgccaatgtgacggcttttgatgaaacgtttgaagcggctagagaccgagtgtacaaagcggttgatgaaattttcaaaccgggactctttttcagaaaagacattggggcacgcgctttaaaggctgcccaaaaataagtgaggaaaacccgcagaatagctgcgggttttttgttatcaaaaagcgggatggcagctagaagaagaaagcacaacgagcgtggttggttttccatgggccatcgaggtgtcaataaaatcctcaagcgtatgtaccgattcagtcacgacctttgtcacatagctgtacatccccgtgatgcggtggttttctgctacatcaggatgcgatgttgcaaaggcggcgtagtgcttgcagcttttcggctccatgagaataaaagcggtgacatgcttgtttagtttttcgtaacagatattcgcgctgtagccggtaatcactcctttgtcttccagcttcctgacacgctccgccgcgcttggcgagctgagtccgacaagctttcccagctcaaccatcgttaatctgccgtttcgctgcaaatgcgagagaatctgaaggtctgtatcgtccatttgtctggctcctttacatatttaggcgaatgaatgaaaattcctttgatcgtaaggtaatgctgttgatttaacttcattgtagcatatggatgccgtcttattttttctataataaagccatcaatcagagagggggcatcatgttgccagaattgcagcgctctattacttggatacaagggacggcgttaacgattggggcggttttaggatgcgggatattaatcctgccgtctgtcaccgcggacacggccggccccgcttctttatttgtttgggtgttcatgtccttcttatccttttttcttgtcggcacgctggcccggcttgtgaaaatagcgcctagcgcgggaggaatcacggcttatgtgcagctggcctttcagaaaaaagccggggctattttgggctggatcatgttagggtccgttccgatcggcgttcccatcatcgctttgactggcgcgcattacgtcagttacatcacagaggcggccgattggcagattacattgattgctggttgcatgctggctatatctattttgcttcatatgagagggattcaactatcagcaaacattagtacactcgttatatgtgtcatcgtatttctgcttgtcacttctattgctgtgtcattgccacacgtcacgatagcagaattcaagccgtttcttccgcatggctggtctgccgctggatctgtttctgttatgatttttttctcttttgtaggctgggaaatgattaccccgttggctgaggaatttcatcgtcctgaaaaagatgtcccgctcagcttgtttttggcagcgtcttgtgtggcggggctgtatatcatgctgtcatttgtgaccgtgggtactcattcatatggagagaatggagaaattgcatcgcttgccatgctcatttcaaaaggagcaggagaaagcggtgtatatgtcacggtatgtttagcgctgtttattacattcgccaccatccatgccaatattgccggtttttcaagaatggtgtacgcattggcgagagaggggcacatacccgtattttttggaaaactcagtgcgacaaaacgtacgcctattcgcgttttgacagcgatggccgcagtgtttggcttagtgcttgcagcgcatggtctgtttcaaatcgatttgacgactctgttgaaagggccgagcgcggcttttatcgcatcttacatatgtacaatggcggcagcactgaaactgctgggcaggagagatataggctggtggatggcgctcggggcatttgtggcgtgcgcggtgatttattcattcagcggctgggcactgctttatccggcagtgctggcagctgcaggatatttctatatgaaaacaaagggtgggcataaaaaaaagcttgatcacgttttgtgatcaagcttttccatttatccgttttgatgctcgttatttccagaatcgctgtgttgaaacatgtaggtcacaggacagaagcgcaagattcccgaacccgctttcatggcccccataaagatgtaaaagagatgcattctgcaccaaggttttttcgtaaactttgcactggcggctgacataatcgtcaatccgcaggcgattctgaacacggcattgatgagactgatgtttggcttcaaggaaatccgctccttttacttaaaaaagttttttaatcgaaccttcaaaaatttgtaacgtttttatcgtgcgtgatgaggaaggatgtgataccatgagtctaatacatgtaaaggagagtatgtgaatgtccgaacgcacctttaactggaaaaacaaagacatcagggcacaggttgatgttgtagactcaaagctgcttccaacgctccttttacggaatgctctcgtcttaaatccatatgtaaaacaatggctgaaaaaaaacatttggatttatcaggaccgcattgtttatgtgggtcatgaacttccgaatagagccgaagaaattcatacgattgattgtgaaggaaaatacattgtgccaggttatattgaaccgcacgcacatccttttcaaatatataatccccaaacactggcggaatatgtgtctcaatacggaacaacgacattcgtgaatgataacttatttttgcttttgcaaagcggaaaaaagaaagcgcttacgattttgaatgaactcaaaaagcagcctgtccagtatttttggtggtcacgctatgacctccagaccgaggttctgaacgaggaccacgtccttccatttgacgtcagaaaacagtggattgaacatccggatgtgattcaaggcggagaaatgaccggatggcctcgcctggtagatggtgatgatttaatgctccactgtatgcaagctacaaagaaacagagaaaacgtattgaagggcattttcccggcgcttctgataaaacgcttacaaaaatgaagctgttcggtgcggattgtgatcatgaagcgatgacaggtgatgaagtgatgagaaggctggaactgggctattatgtttcccttcggaactcttccattcgccccgatgtaagaaaaatcttgcaagagctgcatgagaagggcttccgctattatgaccacttcttttacacgacagatggcgcaaccccgaatttctataaaggcggcatgacaaacgagctgattcgcattgcgttagaagaaggcgtacctgcaatcgacgcctacaatatggcatcatttaatatcgcaaagtattaccaaatggatgattatttaggagttgtcggaccgggcagactggcatcgctaaacatactggaagatccgttaaatccgaatccagtgactgttctgtcaaaagggaccattctgcgtgaaaacggctgtgatttgaaggcgtttacaaagacggactggcacaaaggcggtcttgtcccgcttgagctttcatatgatatgacgatggatgacttgcagttttctatgccgatgggcgtgaaaatgcggaatgcggttattatggagccatatatgattgagatcgacaattcgatggaacagctctcgtttgaccatgatgaaagttatttgacgatgctcgacagacacgggaaatggcgcgtcaatacgatgataaaagggtttgcctcaagcgtgcagggatttgtaagctcctttacgacgacgggcgacattgtcgcgattggaaaaaataaagcggatatgctgctcgctttcgcccgcatgaaagaaatcggaggaggaattgttttagcggagaacggaaacattctgcatgaaatcccgcttgcgctgtgcggctgcgcctcttcggaagcgtatgaagacgtgcttgagaaggaacaaaagctgagagatcttttgactgaaagaggctatgagttttgcgatcctatctatacgctgctctttttgcaaagtacgcaccttccgtatatacgcattacgccaagaggaatattcgacgtcatgaaaaaaactgtactctttccatcgataatgcgttaaaatataaaagagcagggagccgacatatgaaaaaatggatgacagtttgcgcgctgtgtttcgtgttttttctgctggtatcctgccagcagaaggatgctgtcccggatactgcaaagaagctgaaagctcctttaacggggctaaagactgaacagaaagtgactgaacgccgccctgttgctgttgtggtgaacaatcacccgaaggcgaggccgcagtcgggtctgtctaaagccgacattgtcatagaagcgctagccgaagggcaaatcacaagatttctggccattttccaaagccagatgcctgaaactgtcggacctgtgcggagcgcgcgggaatatttcgtcactctcagcaatggctttgacagcatatttgtccatcacggctggagtcccggcgccaaaaagcagctggaatccggagctgccgattatatgaacggattggattttgacggaagcttattttggagagctgatttcagcaaaccgccccacaattcctatacgtcttatgattacataaaaaaggcggcagaacaaaagggttataagctgaagcaggaaacaaatccgctgctgtttcaaacatcagatgcaaaacctgcaaatgaatcttacaatgttcgggtagattatggaacaaataacgttacaaatcttgtcgaatacaactatgataaaaaagctgaattttatacaagaagctctgatggtgtcataacgacagaccgggaaaccggaaagccggttgcaatgcaaaatattttcattgttgaagccagccatcatattattgatcaagatggaaggcgggacatcgacttggaatcaggaggaaaaggtctgttgtttcagcacggaaacgtcattgaaacagactggaaacaagtgaatggcagaattgtgccggtaaaagacggcaagtggcttccgtttgtgccaggaaagacttggatcaatatcgtacctgatcttgatgcggcttccattagtaaaggagaaggtgtgtaacgatgcaaatcgataaattacgcggcaaagagctggaccagttatttaactcgatcttatcgctgaaagacctggaggaatgttaccgattcttcgatgatctatgcacaattaacgaaattcaatcgctggctcagcgccttgaagtggcgcgcatgcttcgcgaaggaaacacgtatcataagattgaaacagaaacaggcgcttccacggctacgatttcccgtgtgaaacgctgcttaaattacggaaatgacgcttatgaaatggcgcttgaccgtgtgaaggagacggaaacagagtcttcttccaaataaaaaaccgccctgccgtctggcaagggcggtttctttatgaaacaaattgatggatcaggttgtcgatattgatgatactgccatcctctttccgatagacaacatgctccttggaaaaatgaatcggcgaattaatccctgctgcggctgcaaggttaaatagtccctcgcgcaatgaaataacgtagttgcagacacgatgctgtttttcctcaacgctcagtgctttttgcaatttcggatctgtcgtcgccacacctgccggacaggtgttggtgtggcagacgagagcgcggatgcagccaacggaaaacatcatgccgcgtgcgatgttaacaaagtcagcgccgagggctaaggcgaccgcgattttatcaggagtcaggagctttccggaagcaaagattttcagctggctgcgcaagccgtactgtttaagaagcgtgtccacaataggcagcgctgtcataatcggaaggccgactgtatccgcgagctcgtaaaaggaagctccggtaccgccttcacttccgtcgatcgtgataaaatccggatgctttccgcttttctgcatatgagagaaaagctcatgcaattcttcaggatgccctgcgaccagtttgatgccgactggcttttgtccgacatctctaagtttttcaataaagtcgagcatttcaggagggtttgagaattcataaaagcggttcgggctgtcaatcgactttccaggttcgacattccgaatgtctgccacttcctctgatactttggcgccgtccacatggccgccgcgggttttcgctccttgtgccagctttagctcaaacgctttaatctggtcaatcctgctttttcttttaaattcctcccacgaaaattccccgtttcttttgcgcacgccgaataggcccggtccgatttggcaaatgatatcggcgccgccctttaagtgatattcagacaatcccccttcacctgtattcatccaggtgccgcctgccagatggagcccttttgagagcgccgtaacagcccgttctccaagagaaccgtagctcatggcagactggccgactaagcccttcacataaaatggcttctcgcatgtatgctcgccaatcacctgtacatcatcaggatggagaaaatacgggtctgccttgatatgttcggcatgctccttgcgtttgaacagattgtcagcatccattttatagatttgggtttcaatttttggcgtttgatttacatgcatttcttccctttgttttggaaacatagcgttacggatataatagccaggtttatcaaaatctcttacagatccaaagcccatcattctgcttttgtatttgccggagatgacggtttgctcatattcctttcgtgaaaatggctgctcttcattgtcattgctgtataaatactgtctgagctccggcccgattttttcaaggatataccgaaaccttccgatgacgggatagttgcgaagaattgagtgctcctgctgtttttcatcctttatgtagatccaggcaaacaagacgatcgggatagcgatgatcccaatgataaatgcgatgagtgctattatgatggtttccatctctcagcctccctttttatgtaaccatttccacagtagaacactttccaaacaatagcagaaggaatctggtgaaaaatgtgtgctcctgccgatacaggactcaccatgcaggtactgccatatgctctctttttttatgaaaaaagaatcaaaacacctttttcagtgaataacgagattaacggctttttccgtttttccgcgctatgtgaatttgttataatgtttaaatggtaacaaacgaatggaggaacgtatgacgtgtacgatgtaacggagtggaagcatgtctttaaactcgatccaaataaagatttgcctgacgaacagctggagattctttgcgaatcaggaacggatgcggtcattatcggaggaagcgatggtgtgacagaggataatgtcctgcggatgatgtctaaggtaagacggtttttggtgccgtgtgtcctagaggtatcagcgattgaagcgattgttcccggctttgacttatattttattccgagtgtattaaacagcaaaaacgcggattggattgtcggaatgcaccagaaagccatgaaggaatacggagaactgatgtctatggaagaaatcgtggcggagggctactgcatcgcaaatccagattgcaaagccgcggcactgactgaagcggacgccgatctgaatatggatgatattgtcgcctatgcgcgtgtgtcggagctgctgcaactgccgattttttatttagaatacagcggcgtgcttggagacatagaagctgtcaagaaaacgaaggctgtattggaaacgtccaccttgttttacggcggcggcatcaaggatgcggaaacggccaagcagtacgcagagcatgcggacgtgatcgttgtaggcaatgcggtgtatgaagattttgacagggctttgaaaacagtagcggctgtgaaaggcgagtagtaaattgtacggatttggtttatgatagaacgtatgttttgtataggcgggtgaacaaattttgaattatattagcaatcaattactaagcggtttaaaccccgttcagcaggaagcagtcaaaacaacggacgggcctcttttgctgatggcgggagcgggtagcggaaagacgcgtgtcctgacccatagaattgcttatttaatggcagaaaagcatgtggcgccgtggaacattctggcgatcacatttacaaataaagcggcacgcgaaatgaaagaacgtgtggaaagcatcctcggacccggcgcggacgatatctggatctccacattccacagcatgtgcgtgcggatcttgcgcagagatatcgaccggattgggatcaaccgaaatttctccatccttgatacggctgaccagctttcagtgatcaaggggattttgaaggagcgcaatcttgatccgaagaagtttgacccgagaagcatcctcggcacgatcagcagtgcaaaaaacgaattgaccgaaccggaggaattctctaaagttgctggcggctactacgatcaggtggtcagcgatgtatatgctgattatcagaagaagctattgaaaaaccagtcgctcgatttcgacgatttaattatgacgacgattaaactgtttgacagagtgcctgaagtgcttgaattttatcagcgcaaattccagtacatccacgttgatgagtatcaggatacgaacagggcacaatacatgctcgttaagcagcttgccgagcgtttccagaacctttgcgttgtgggggattctgatcagtcaatctacagatggcgcggcgcggatatcaccaacattctttcatttgaaaaagattatccgaatgcaagcgtgattttgctagaacaaaactatcgttcaacgaaacggattttgcgcgcggctaacgaggtcattaaaaacaactctaaccgcaaaccgaaaaatttgtggacggaaaatgatgaaggcatcaagatttcctattatcgcggtgataatgagttcggtgaaggacagtttgtggccggcaaaattcatcagcttcacagcacaggcaagcggaagctgtcggatatcgccatattataccggacaaacgcgcagtcccgtgtgattgaggaaacgcttctcaaagcgggcttgaactataacattgtcggcggcacaaagttctatgacagaaaagaaattaaagacattcttgcgtacctgcgcctcgtatccaatccggatgacgatatcagtttcacgcgcattgtcaatgtgccgaagcgcggagtcggcgcgacatcacttgaaaaaatcgcttcgtatgcggccataaacggcttgtcctttttccaagcgattcagcaggttgattttatcggcgtcagtgccaaagcggcaaacgcgcttgacagctttagacagatgattgaaaacctgaccaatatgcaggattacttatccattacagagctgacagaagaaattcttgataagacggaatacagagaaatgctgaaggctgagaaatcgatcgaagcccaaagccgtttagaaaatatcgacgagttcctgtctgttacgaaaaactttgaacagaaaagtgaagacaagacactcgttgcgttcctgacagacttggcattgatcgcagatattgatcagctcgatcagaaggaggaagagtcaggcggcaaggatgcgatcaccctgatgacactgcacgccgcgaaaggactggagtttccggttgttttcttgatggggcttgaagaaggcgtcttcccgcatagccgttcactcatggaggaagcggaaatggaagaagaacgccgccttgcgtacgttgggattacaagggcggaacaggagctttatctgaccaatgctaaaatgcgcaccttgtttggccggacaaatatgaacccggaatctcgcttcattgctgaaataccggatgatttattggaaaacctaaatgagaaaaaagaaacaagagcgacgtctgcgagaaaaatgcagccgagacgcggccctgtttcacgcccggtatcctacgccagcaaaacaggcggcgacaccttgaactgggcagtcggagataaggcgggccataaaaaatggggaacaggaactgtcgtcagcgtgaaaggcgaaggagaagggacagagcttgatattgccttcccgagccctgtcggcgtgaaacgcctgttagcagcatttgctcctattgaaaagcagtaattgaagaggaaaggaagaagcagatggacaaagaaacagcgaagcagcgggcagaagaactgcgccgcaccatcaacaagtatagctatgaatattacaccttagatgaaccgagcgtcccagatgccgaatacgacagattgatgcaggagctgatcgcgatcgaggaggagcacccagacctcagaacgcctgactctcctacgcagcgcgtcggcggagccgtgcttgaagcgtttcagaaagtcacccacggcacaccgatgctcagtctgggcaacgcctttaatgctgatgatcttcgtgatttcgaccgccgtgtgcgccagtccgtcggcgacgatgtggcgtataatgtggagctgaaaatagacggtcttgctgtttctctccgttatgaagacggctattttgtcagaggggccacaagaggtgacgggacgacgggagaggatatcacggagaatctgaagacgatccgcaatatcccccttaaaatgaaccgtgagctgtcgatcgaagtgcgcggcgaggcgtatatgccgaagcgttcgtttgaagcactcaatgaggaacggattaaaaatgaggaagaaccgttcgccaatccgcgaaatgccgcggcgggatctctcagacagctcgatccgaaaattgcagcgaaacgaaacctcgatatcttcgtctacagtatagcggagcttgacgagatgggtgtagagacgcaaagccaagggcttgattttctcgacgaactcggatttaaaacgaatcaggaacgaaaaaaatgcggcagcatagaagaagtcattacgctgatcgatgagcttcaggcgaagcgcgcggacctgccgtacgaaatagacggcattgtcattaaagtcgattctctcgatcaacaggaggagctcggttttacggcgaaaagcccgcgctgggccatcgcgtataagtttcctgctgaagaggtcgtgacgaagcttctcgatatcgaattaaatgtcggcagaacgggtgtgattacgccgactgcgattcttgagccggtaaaagttgccggcacaacggtctcaagagcatcccttcataacgaagatttaattaaagagaaggacattcggattttggataaggttgtcgtcaaaaaagcgggcgatatcatcccggaagttgtgaatgtcctcgttgaccagcgcacaggagaagaaaaggaattcagcatgccgacggaatgtcctgaatgcggcagtgaactcgtccggatcgaaggagaagtggcgcttcgctgcattaaccctgaatgtccggcgcaaatccgggaagggcttatccatttcgtttcccggaatgccatgaacattgatgggctcggcgaacgagtgatcacacagctgtttgaggaaaaccttgtccgcaatgtggcagatttatataagctgacgaaggaacgagtcatccagctcgagcgcatgggcgaaaagtccactgaaaacctgatcagctccatccaaaaatcaaaagaaaattcgttagagcgcctgctgtttgggcttggcatccgttttatcggatcaaaggccgcaaagacgcttgccatgcattttgaaagcttggagaacctgaaaaaagcctctaaagaggaacttctcgcggtagatgaaatcggtgaaaaaatggctgatgctgtgatcacctattttcataaagaagaaatgcttgaactcttgaatgaacttcaggagctgggcgtaaacacgctctacaaaggcccgaaaaaagtaaaagcagaggacagcgactcttactttgctggtaaaacaattgttctgacaggaaagctggaagagctgtcaagaaacgaagccaaagcgcaaatcgaagcgctgggcggaaagctgactggaagcgtcagcaaaaacacagacttagtcatcgccggagaagcggcgggaagcaagctgacaaaagcacaagagctgaacattgaagtgtggaatgaagaacagttaatgggagagctaaagaaataagaggagtgttttctattgaaaaagacgttggcattggcggcaacggcggcagtattaatgctgtctgcctgctcgtcaggtttcgggggggagaaggaggaagagattacgcaaaagacggcgaaatcgtcagaaaaagcgattgtcccgaaatataatatctctgactcctattacaaaatggtgctgccgtttaaggcaggcaaagcgcgcggcttaacaacggaacagctgaatacaaggctggacattgacgaatttgaaacagggctgatgcgccttgcccaagattctttctcaactgacgattatctgttccaagaaggacaatatttagatgaggatacagtattaagctggctggcacggaaaaaaacgggctctgatttgaaaaaagccgaaaaagaagataagaacttcaaaaatgaaggcttgaacccggcgctcccgagttctggttcaacagaagaaaagaacgaaagcagcccaatttatttagcatccatgcttgagcacgattatttagtcagaaaagacaagaattctatccagcttggcggcgtcatgatcggactggcgttaaactcagtgtattactatcgtgaaaaaactggcgacccgcaaaaagaagtggagattaaagacagcacgcttcgccagcagggagaaaaaattgcacaggaggttattaaccgcctccgcaaaaaagataacttgaagaatgtgccgattaccgtggcgctctacaagcaggcgtcaaaaacatcgattgtgccggggaacttcatcgccaaaacagaggtcaaagcaggctctactgatatctcaaattgggatgacatcaatgaaaaatatgtattctatccggcggatacaaccacagcagaaaagtacccggatgacaccgaggtctttaagcggttcaaaaactcaattgaagaatatttcccgaactatacaggcgttgtcggtacagcgctgtatgaaaatgatgaaatgaagaaaatgaagattgacataccaatgcaattctacggaaaaagtgaagttgtcgcgtttacccagttcttaacgggtgaagtgatggactactactctaagagctcagttgatgtcgaagtcaatatcacgtcctcagacggacaggaagcggtcattatccgcaatgccggagataaagagccgactgttcacatttatgactgatagaaaacccttgtgccatattggcacaagggtttttatgttacaattaacaggaaaagggaaaatattttcacttctgccgaaacacaaatcaaggggaggtatgttgatgctggaaatcgtgtgaaaacaatcattatcaaatctatagcaatgaaaggatgttagacgtgcataaagatatcaaaaaaatatttcatgaagagcaggttttggcagaagctgcagcgagatacggtttctcaaaagatcaggtgcgttttctggctgatgcggaaaactatgtatatgaatgtatgaaagacaatcaaccttatattttaaagattacccatacgattcggagatcttctgattatatgatgggagagatggaatggctccgtcaccttgcaatagggggaatttcagtagccaaaccgctcccgtcgctgaacggaaaagacgtagaagcagtgccggacggaaacggcgggtcatttttattgagagtgtatgagaaagcgccggggcaaaaagtggatgaatcggactggaatgaaacgctattttatgagcttggcagatacacaggcagcatgcacagcctgacaaaaagctacaaattgagcaatcccgctttcaaaagacaggaatgggatgaagaggagcaattaaagctgagaaaatatgtgcctgaagatcagataaaggtgtttcagcaagccgattctttgatgaatgaactgcggaggctcccgaaaagccaggacaactacggcttggtgcatgcggatctgcaccatggcaattttaactgggatcatggcaaaatcacggcatttgattttgatgatatcggctacaactggtttgttaacgatattagcattcttctctacaatgtcctgtggtatcctgttgtgccatatgatgataaagctgcgtttacagaagaatttatgacgcattttatgaaagggtactgggaggaaaatgagcttgaccctgcatggctgatgataatacctgatttcctccgccttcgccatatgctgatttacggattgctgcatcagatgtttgaccttaacacaataggagaagaggaaaaagaaatgctggccggtttcagaagagatatagagaatggcacgccgattacagcatttgatttttcagcactggtgtagatagaaaaagccaatgggattccagtcccattggcttttataatgtatcacacttcacgccgactacgccttcaatggctttaatgtcatagtagacatcggtcgtgtatctgtttttatggacgcggaccttcacttccataattggaaaatccttttcgcctaggtcgtcgatccgaacggagtgtgctttgatatctcttcttttcatttcttttaaaatctctgtcattttgtctttatcagaaagtgacattctgatgcggatgtctttttcctgcaggcggtcggggccgatttttctgaccacccatgggagaaattccacactgatcaggatgaacagaagactggcaaacgcttctttataaaaaccggctcccgtagcaagcccgagccccgctgccccccagatcatggccgatgtcgtcaggccggaaatgacatcattgctttttcgcaggatgacaccggcgccgataaacccgacgccggagatgatttgtgccggcagacgaagcggatccatcatgatgcggtagtatttagggaaatgatatgccgcattaatactgacgatcgtcagcatgcatgagctgactgcgatgacaatacaggtttttaatccgagcggcttattttttaattcgcgttcaagcccgatgaccatgccaatcaatgtggcaatgcccaatttcaataaaatatcaggatcaatataccagctcaacagcaaacttcccccttctctatggtgtttttaaataaatatgattttctcacagtatttatagcaaaacaagagcacaaaagccaccaagctgcgcttgatggcttattgcttactttttgcgttttaacagcttttccatgacaccgaataatcggtaagaggcttttgcaggacgttttgtgatcatgctgacaatgatgccggcaatcatactgagaataaacccagggatgatttcgtacacaccggttgattttgccaggccggttgtaatccagatcaacacggtcgcagccccgacaatcatggcagcaagcgcgccccattcgttcattcgtttccaatacagactgagcagaatcgcaggcccgaaagctgaaccgaagccggcccaagcgtatccgaccaaatcaagaatggtgctgttcgggttcaatgacaagagtaccgcgataacggcaatgactaagacggacaatcgcccgatcatgaccaattctttatcagaagcttttcgtctgaaaaatgaccggtataaatcctctgttacagcacttgctgtgaccaagagctgtgaggaaatcgaactcatgatggcagccaaaatagctgacaataagaaccctgtaattaatgggtggaacaagattttagagaagataatgaaaatcatctccggatcttttacagcaactccgaatttatgggcgtatgcaacaccgattaaacccgtcagcacggaacctagaactgtaatgatcatccagctcatgccgattcggcgtgcaggttttaaatctttaatgtctttaatggccataaatcggacgatgatatgaggctggccgtagtagcccaacccccaggctaaataggaaataatgctaatgacgctcgcgcctttaaaaatatccaataaatgtggattaacagcgtcgatttcatggaaagtcggagcaacgccgcccacatgggtaaaagcaacgatcggcacaagcactagtgctgcaaacatgatcgcaccctgcacgaagtcagtcagactgacagcaaggaaaccgccaaacagtgtgtataacacgacaactgcggtggtcagaaacaggcctaatttgtaatccgcaccaaaagcagattcaaacagccgtccgccagataccataccggaagaggtatacaatgtgaaaaagatcatgatgatcaatgcagatacgattttcagcagtgatgaagaatgctggaatcgtttatcaaagaaatcaggaattgtaatcgcatcatctgccgcttctgtataagcacgcagccttggagccagcagcaagtaatttgagtacgccccgattgtaagacctaaagcaagccataaggtggacagccctgtcgcaaacatcgcgccgggaacacccatcagcatccatccgctcatatcggccgcgccggcagacaaagcagtaacgaatggtccgaggcctcttcctccaagcatgtaatcattgatgtcagtggttttcttgaatgcataccagccgattaacagcatggcaataaagtaaattcctaaagatataataatttcaatactcacgttttaccctctcttcatttctaataatgttgcatcacctctcaaattgatggtgccagttaagcagcctggcgtaagtgcaaaacaaaagaaattcttttgcgggtgcacttggtaacttaacctaacaaagtattcccggccattcaagcgatgaaacattgatcataagctggaaataccgttgcaaacctagaagggaataaagaataaaacgctttcaaaaaataattaaagtaaaaatattcagaaaaatatttcgtttctccttctcctcattttagtataaaatatatagggtattgtttcgaaaacacaggcctgtctcaaggcgttttgttgctttaaagggcttgtttttgatatgatcagtattatatgacttaacggagaaatatgtggaggtggatcatatgtcacgaatttcaatagaagaagtaaagcacgttgcgcaccttgcaagacttgcgattactgaagaagaagcaaaaatgttcactgaacagctcgacagtatcatttcatttgccgaggagcttaatgaggttaacacagacaatgtggagcctacaactcacgtgctgaaaatgaaaaatgtcatgagagaagatgaagcgggtaaaggtcttccggttgaggatgtcatgaaaaatgcgcctgaccataaagacggctatattcgtgtgccatcaattctggactaaaggagggacacaagaatgtcattatttgatcataaaatcacagaattaaaacagctcatacataaaaaagagattaagatttctgatctggttgatgaatcttataaacgcatccaagcggttgatgataaggtacaagcctttttggcattagatgaagaaagagcgcgcgcatacgcgaaggagcttgatgaggcggttgacggccgttctgagcacggtcttcttttcggtatgccgatcggcgtaaaagataatatcgtaacaaaagggctgcgcacaacatgctccagcaaaattctcgaaaactttgatccgatttacgatgctactgtcgttcagcgccttcaagacgctgaagcggtcacaatcggaaaactgaacatggacgaattcgccatggggtcatctacagaaaactcagcttacaagctgacgaaaaacccttggaacctggatacagttcccggcggttcaagcggcggatctgcagctgcggttgctgcgggagaagttccgttttctcttggatctgacacaggcggctccatccgtcagccggcatctttctgcggcgttgtcggattaaaacctacatacggacgtgtatctcgttacggcctggtcgcatttgcgtcttcattggaccaaatcggaccgattacacgtacggttgaggataacgcgtttttacttcaagcgatttccggcgtagacaaaatggactctacgagtgcaaatgtggacgtgcctgattttctttcttcattaactggcgacatcaaaggactgaaaatcgccgttccgaaagaataccttggtgaaggtgtcggcaaagaagcgagagaatctgtcttggcagcgctgaaagtccttgaaggtctcggcgctacatgggaagaagtgtctcttccgcacagtaaatacgcgcttgcgacatattacctgctgtcatcttctgaagcgtcagcgaaccttgcacgctttgacggcatccgctacggctaccgcacagacaacgcggataacctgatcgacctttacaagcaaacgcgcgctgaaggtttcggaaatgaagtcaaacgccgcatcatgctcggaacgtttgctttaagctcaggctactacgatgcgtactacaaaaaagcgcaaaaagtgcgtacgttgattaagaaggatttcgaggacgtatttgaaaaatatgatgttattgttggaccgactacaccgacacctgcgtttaaaatcggtgaaaacacgaaggatccgctcacaatgtacgcaaacgatatcttaacgattccggtcaaccttgccggcgtaccgggaatcagtgtgccatgcggattagcagacggacttccgctcggcctgcaaatcatcggaaaacactttgatgaaagcactgtataccgcgttgctcatgcatttgaacaagcaacagaccatcataaagcaaaacctgaactgtaaggggtgaaaagaattgaactttgaaacggtaatcggacttgaagtccacgttgagttaaaaacaaaatcaaaaattttctcaagctctccaacgccattcggcgcggaggcgaatacgcagacaagcgttattgacctcggatatccgggcgtcctgcctgttctgaacaaagaagccgttgaattcgcaatgaaagccgctatggcgctcaactgtgagatcgcaacggatacgaagtttgaccgcaaaaactatttctatcctgacaacccgaaagcgtatcagatttctcaatttgataagccaatcggcgaaaacggctggatcgaaattgaagtcggcggcaaaacaaaacgcatcggcatcacgcgccttcatcttgaagaggatgccggaaaactgacgcatacgggcgacggctattctcttgttgacttcaaccgtcaaggaacgccgcttgttgagatcgtatcagagccggacatccgcacgccggaagaagcgtacgcatatcttgaaaagctgaaatccatcatccaatatacaggcgtttctgactgtaaaatggaagaaggctcacttcgctgtgacgccaatatctctcttcgtccgatcggccaagaggaattcggcacaaaaacagaattgaaaaacttgaactcctttgcgtttgttcaaaaaggccttgagcatgaagaaaaacgccaggagcaggttcttctttccggcggcgtcatccagcaagaaactcgccgttatgatgaagcaacgaagaaaaccattcttatgcgtgtcaaagagggatctgacgactaccgttacttcccagagccagatctagtcgagctctacattgatgatgaatggaaggaacgcgtaaaagcaagcattcctgagcttccggatgagcgccgcaagcgttatatcgaagagcttggcttgcctgcatatgacgcaatggttctgacgctgacaaaagaaatggctgatttcttcgaagaaaccgttcaaaaaggcgctgaagctaaacaagcgtctaactggctgatgggtgaagtgtcagcttacctaaacgcagaacaaaaagagcttgccgatgttgccctgacacctgaaggccttgccggcatgatcaaattgattgaaaaaggaaccatttcttctaagatcgcgaagaaagtgtttaaagaattgattgaaaaaggcggcgacgctgagaagattgtgaaagagaaaggccttgttcagatttctgacgaaggcgtgcttctgaagcttgtcactgaggcgcttgacaacaatcctcaatcaatcgaagactttaaaaacggaaaagaccgcgcgatcggcttcctagtcggacagattatgaaagcgtccaaaggacaagccaacccgccgatggtcaacaaaattctgcttgaagaaattaaaaaacgctaataaaaaagcagcccttagaggctgctttttttatggtcaaattgagataaagacaagatgagggcccgaagcctttcaacttctttgtcgttggttccggccaaattggacagcatgcctttaataatcggcttgcgcggtttatcctgagtcaattcttcctcgataacatcaagtgacacggtgatatcctcgggcagcgtgctgttttctttcactttctgaatgtcctcaagcagctggtcttttcccgcaggcatcgggttaaaaatgtcttttgatacaatcggattgagtgcagaacggctcagcccctgtacaagatcatccagtctctcaataataaaggctgagatttcttctgcatcgatattaagctcaccgttaaataccatcacgttcatataggaatgcacaatgcctcttgccatgatggacagatctgcgacataccgctcgattccttcgccataggataccagcaaggcgttccggtacagcttatccgtctccatggttactttgtaaaagtattgcttgatttcttgattttccggaatgatattttcggtaagcaaaagaacgataaaatctttatgatcgcgaaaatcctcaaattgagcgccaatttgcttttttaacacttccttaggcggctttccggcgagatcttcttctatatttttcattttgttcatagacataccgatataatattcacaggcagataacagcagcgcttctttcgatttgaagtgcaaataaaaagcgcccttcgaaatgccgcattcactggcgatttcttggatcgtcgtagctgcgaatccttttttcgcaaataaacgaatgctggtttttatgattctctcttttttttcattcatgacgtgcttccccttaatccttgaaaaatttagtaaaattttctggtatatgagttgacgttgttgcgttataacgtttagtattatatagaatgaccagtcagtcaataaaaaatgtaatggaggatatgatgaaccacgttattaatttcgttctgaaaaacaaattcgccgtatggctgatgacgattattgtaacggcagccggcttgtatgcgggtatgaatatgaagcaagagtctattcctgacgtgaacatgccttacttgacgatcagcacgacatatccgggtgcaacaccaagccaagtggctgatgaagtgaccaaaccggttgaacaagccgtacagaacttggacggtgtcagcgttgtgacgtcgacgtcctatgaaaacgcatcgtcggtcatgattgaatatgattatgagaaagatatggacaaagcgaaaacagaagcagctgaagcgttagaaaacgtcaacctgcctgatgacgcgaaggatccggagatttcacgctacagcttgaactcattcccgattctgacgctgagcgtgtccagtgataaagataatctgcaagagctgacgaaacaagtggaggacagcctcgtttctaagcttgaaggcatagaaggcgttgcgtccgtccaagtatcaggccagcaggtggaagaggttgaattctctttcaaagaagacaaactgaaggaatacggccttgatgaagatacagtcaagcaagtgattcaaggttcagatgtgacaactccgcttggattgtacacattcggaaatgaagaaaaatctgtcgtcgtcagcggcgatattgaaacaattaaagatttgaagaatatgagaatcccgacggcatctgcttcaagtgcaggcagcagcgcagcatctcaagcaggtgcgcagagtgctcaagcagcccaaagcgcgcaagcggcagcacaggtgcagcaaagcgcaagcacagcagtgccgacggtcaagctttctgacattgctacaattaaagatgtgaaaaaagctgaatccgtttcacgcacaaatggcaaagacagcatcggcatcaacatcgtcaaagcaaacgatgcgaatacggtagaggttgccgacgatgtcaaagctgagctgaaaaagttcaaagaagaccataaaggcttcaattacagcgcaactctcgacatggcggagccgatcacacagtcagttgacacgatgttaagcaaagccatcttcggtgctatttttgcgattgtgattattctcttattcttaagagatatcaaatcaacattaatttctgttgtttcaattccattatcattgctgatcgcactccttgtgctgcagcagcttgatatcacattgaatattatgacgctcggcgcaatgaccgttgccatcggacgtgtagtcgatgactccatcgttgtgatcgagaacatttaccgccgcatgagactcaaagatgagccgctccgcggaaaagccttggttcgtgaagcgacgaaggaaatgtttaaaccgatcatgtcatcaacgattgtgacaatcgcggtattcctgccgctcgcacttgtaggcggacaaatcggtgaattgtttattccatttgccttaacgattgtttttgcgcttgccgcatccctagtgatttcaatcacgcttgtgccgatgctcgcacacagcctgttcaaaaaatcattaaccggtgcgccgattaaagcgaaagaacacaaacctggcagacttgcaaacatctataaaaaagtattgaactgggcgctgagccacaaatggatcacgtctatcatcgcggttctgatgctccttggaagcttgttcctcgtaccgttaatcggtgccagctacctgccgtccgaggaagaaaaaacgatgcagctcacatacagcccagaaccgggtgaaacgaaaaaagaagccgaaaatgaagctgaaaaagcggaaaaaatcctgcttgaccgcaagcatgtcgatacggttcagtattcattaggctctggcagcccgcttgccggaggagattctaacggtgcgttattctatatcaaatatgaaagcgacacacctgactttgataaagaaaaagataacgttctgaaggaaatccaaaagcaatctgaccgcggagaatggaagtcacaggacttcagctcttcaggcaataataacgaattaacatactatgtgtatggcgattctgaaaacgatattaaagacacggtcaaagacattgaaaaaatcatgaaagatgaaaaggatctgaaaaacgtaaattcaggcctttccagcacatatgatgagtacacatttgtcgctgaccaagaaaaactaagcaagctcggtttaaccgcgtctcaaatttctcaggccttaatgtcacaaacatcgcaagaaccgctcaccactgtgaaaaaagacggcaaagagcttgatgtgaacattaagacagaaaaagacgagtataagagtgtgaaagatttagagaataaaaagatcacttccgcgactggccaggaagtcaaaatcggcgatgtggcaaaagtgaaagaaggatcaacatcagataccgtgtcaaaacgtgacggaaaagtctatgcagatgtcacaggtgaggttacctctgacaacgtcacagccgtatcagctgctatccagaagaaaatcgataagcttgaccaccctgataacgtatcgattgacacaggcggcgtatcagcggatatcgctgattccttcacgaagctcggtttagcgatgctggcagcaatagcgatcgtttaccttgtgctcgtgattaccttcggcggagcactagcgccatttgcgattctgttctcattgccgttcacagtcatcggtgccctggtcggactttacgtatcaggtgaaacgatcagtctgaacgccatgatcggtatgctcatgctgatcggtatcgttgtcacgaatgccattgtcttaattgaccgcgtgattcataaggaagcggaaggcctgtctacgagagaagcgctcctggaagccggctctacacgactccgtccgatcctgatgacagccattgcgacaatcggcgccttgattccattagccctcggcttcgaaggcggaagccaggtcatttcaaaaggactcggcgtaacggttatcggcggtttaatcagttcaacgcttctgacgctcctgatcgtgccaatcgtatatgaagtattggcgaagttccgcaagaaaaaaccgggaacggaagaagagtaaaaaacaaaaagcctcagctctgctgaggctttcagcttgttgaaaaaccctcgcattcgttgtcaggtctgcgcgtcggtgctcacgaattctacattcgctccgctccaatgctcccccttcctagactacaagggttttcaatcaagctgaaagaatgttaaggatgacaaaagctcaaaacaagaatcagttttgagcttttgtgcgttttcacctgtaagattatgtacattttgttgcgatttttttaactcatagtataattaaaggttgttagtgtaaaaatggatcggatactcttaagtaggatgatgagataatgaaacgtgcacgcataatatacaatccgacttcaggacgggagatctttaaaaagcatcttgcccaggtcctgcaaaaatttgaacaagccggctatgaaacctccacccatgcgacgacatgcgcaggagacgctacacacgctgccaaggaagcggcattgcgtgagtttgacctgatcattgcggcaggcggagacggaacgatcaacgaggtcgtcaacgggcttgcgcctttagacaatcgtccgacactcggtgtgattcctgtcggcacaacgaacgacttcgccagagcgctcggaatcccacgcgaggatattttaaaagcggcagatacggtcattaacggcgttgcccgcccgattgatatcggacaggtcaacggccagtattttatcaatatcgccggcggaggccgtctgacggagctgacgtacgacgtgccaagcaaactgaaaacaatgctcggccagcttgcttattatttaaaaggaatggaaatgctgccttcacttcgtccgacagaagtcgagattgaatatgacggcaagctgtttcaaggtgaaatcatgctgtttttggtcacgctgacaaactccgtcggcgggttcgaaaagctcgcgccggattccagcctgaatgacggcatgtttgatttgatgatactaaagaaagcaaaccttgctgaatttatcagggtcgccacgatggcgcttcgcggagaacacatcaacgaccagcacattatttatacaaaagcgaaccgcgtgaaagtcaatgtatcagaaaagatgcagctgaacctggacggcgagtacggcggcatgctgccgggcgaattcgtgaatctgtaccggcacattcacgtcgtcatgccgaaggagaaagcggaacagttggatgactaaaacttggcttggtaagccaagctcagaatgttgacaaaatcctaaaacagttttcgttttaggattttgtcatcttttcagcgtgattgaaaacctttgaagtctaggaagggcgagcatcggagcacagcgaatgttgaattcgtgagcaccgaagcacaggcctgacaacgaatgcgaaggtttgcctacacgctgaaacttggcttgaataggccaagtttttctttcgcttaaaactagaggtgattatagatgaaaatgaaacccccagtagaaaaaaatgaatactacgatgtgacatttgaggatttgacacatgaaggagcgggcgtcgcaaaggtccaaggcttcccgatctttgtgccgaatgccctacccgaggaaaaagcccaaatcaaagtgacacgcgtcaaaaaagggttcgccttcggccgcctgattgagctgaaggaagaaagcccgcatagaacggacgccccatgcccgatttacaaacaatgcggaggctgccagcttcagcacatgacctacgaaggccagctcctgtttaaacagaaacaagtcaaagacgtcttagaacgcatcggcaagctggacctttcaaaagtcaccgtgcacccgacactcggcatggaagacccgtggaactacagaaacaaagcacaggtgccggtaggagaacgggaaggcggactcgtcgcgggattctatcagcaaagaagccatgacatcatcgacatgagcgcctgcctgatccagcaatccaaaaacgacgaagccgttcaagctgtcaaagacatttgcgcaaactacggtgtcaaagcctacaacgaagaacgccacaaaggctggctccgccacatcatggtcagatacggcgttgttacgggcgaaatgatgatcgtcttcatcacaagaacaagcgacttcccgcacaaagcgaagatcatcgaagacatcacagcgcaattcccgcacgtcaaatccatcgtgcaaaacatcaacccaaacaaaacaaacgtcatttttggcaacgaaacaaacgtcatctggggcgaagaatacatctacgacctcatcggagacgtcaaattcgccatctccgccagatcgttttatcaggtcaacccagagcaaacaaaagtgctctacgacaaagcgcttgagtacgctgagcttcaaggggaagaaaccgtcatcgacgcttactgcggcatcggaacgatttctctcttcctggcaaagcaggcgaaaaaagtgtacggtgtagagattgtgccggaagcaattgaggacgcgaagcgaaacgccgaattaaacggcaacacaaacgcagagtttgctgttggagaagcggaaaccgtgattccaaagtggtacgaagaaggcattacagctgatacgctggtcgtcgacccgccaagaaaaggctgcgacgaagccctcctgcggacaattgtggagatgaagccgaagcgggtagtgtatgtgtcctgtaatcctggcacgcttgcgagagatttgcgggtgcttgaggatggcgggtacgtgacgcgcgaagtgcagcctgtggatatgtttccgcatacgaatcatgtggagtgctgtgtgttgataaaattaaaagaataaatagtcaaaaatctatgctgatggaactgttggttctctaaaacgataattgatttcaatggttccatttgcatgtacttctatttcatctactaacaaatgaagcatttcgggggtaagtgtaccttccttcatgaatttatctaagctctttttaaaatcaattatttctttttcaatcttttgaaattctaggtccttagatagttggtgaagggtagtttcaaaatttgaaatatcttcattggtgatatttatggctaattggtaatcttctttagatataacaccattagcaagagagataactaaattggatttatctctctttttatcgtttaatttttcattaatttcgattatcttagattcgattttttctttgtactttaacgctttttcacttaattctttaaaataattttccttactgaatttcaaatatatcttatttaggttggttattactttatcagttaaatctatttcacttacgtaatgatcactacatgcttttaaaccatgtttattataacttccacaaacataaccttttcgattctttttaaaatgcattgacctcctgcaatctttgcaaaccgcagtatttgtaaagagatgtacttcagcttgaggtctccttctttttctagttattaaaatctcttgtacaataagaaagtcttctaaaggtatgattggttcgtggcttttttcaataattatttggttttctaggttaactgaccttcttcttttactggtaacactcggtctatattctctacattgttgtagtgtcccagtatagtgaggattttcgagaatttttcttattgaagatccgtgccatttgtcagtagcgttctttttgcgggcaagctgcgagggactagtgaccccttcgttatacaatccccttgctattgcatcaaagccttttccagcaatatattctgaaaagattctaatatttactattttctctgcgtttgctgaatttgagagagatatgattgtagaacgaactcaagaaggtaaaatgttggccaagcagaatccggatttccgagaaggaagacccaaaaagttcacaaagcagcaaatcaatcatgcattaacattactagaaaatcattcgtataaacaagttgaagatatgactgggatatcagtttctacacttgtaagagctaaaaagaagaaagctgctgaagctataaatggataaatattgtgaattaattattcaatatcttgagaaatttttataaaagtaatcaaaagtttaatgggggaaacgaaatggcgctcattgatttagaagataaaattgctgaaatagtgaatcgagaagatcattcagatttcttgtatgaattactcggtgtatatgatgttccacgagctacaattacgcgcttgaaaaaaggaaatcaaaaccttacaaaacgggttggtgaagtacacttaaagaataaggtgtggtttaaggaggctaagaaaggaaagctctttgacgcccttattgatatagaacaacaagttgaatatctttcagctaagccacgatatttattagttactgactatgatggagtattagcgaaagatacaaaaacattagaggctcttgatgttaaatttgaagaacttcctcagtatttcgatttcttccttgcttggaaaggtattgagaaagtagagtttgaaaaggaaaaccccgctgatattaaagcagccgaacgttttgcacggatatatgatgtacttcgtaaagaaaacaatattattgagactaatagagggttagatttatttcttattcgtttactgttttgttttttcgcagaagatactgacatcttcaaacgaaatagttttacgaatttaattaagactttgactgaagaagatggttcaaatctaaataaattatttgctgatttatttatcgtgttagataaaaatgaacgagacgatgttccatcttatttaaaagagtttccgtatgtaaatggccagttgtttactgaaccacatacagagttggaattttctgccaaatccagaaagttaattattgagtgcggtgaattattaaactgggctaaaatcaatcctgatatctttggttcaatgattcaagctgttgcttctgaagaaagccgtagttatttaggtatgcactacacaagtgtccccaatataatgaaggttattaaaccgcttttcctagataaacttaatcagtcttttttagatgcatacgatgattatacaaaacttgaaaatcttctaacacgaatcggcaaaattaaattctttgatcctgcatgtggttcagggaactttttgattattacctacaaagaattacggcgtatggaaatcaatattataaaacgacttcaagaactcttgggagagtatctttatgtaccttcagtaactttatctcaattttacggaatagagattgaagattttgcacatgacgttgcaaaattatcactttggattgctgaacatcaaatgaatgaagaattaaaaaatgaagttcataatgcagtacgcccaacgttaccacttcatacagcaggggatattcgttgtgcaaatgctattagggttgagtggactgaggtttgtcccgcacaaggatctgaagaagtatatgtttttggtaatccaccgtatcttggttcaaaaaaacaaaacaaagaacataaatctgatatgttatcaatttttggaaaagtcaagaatggtaaaatgcttgattatatttctgcttggttttactttggtgctaaatacgcttcaactacaaatgcaaaagttgcctttgtatcaacaaattcagttactcaaggggaacaggtttctatcttatggaatgagttattcaagtttggaattcaaatcaattttgcctataaatcttttaaatgggcgaataatgctaaaaataatgctgcggtaattgttgtgattgtaggttttggcccgttagataccaaagtaaacaagtatttatttgttgatgaaacgaaaaagctagtttctaacattagtccctatttaactgatggtgaaaatattcttgtttcttctaggacgaagccaatttcagacttacccaaactgcattttgggaacatgcctaatgatggcggaggattactctttaccattacggaatatacagacgcaatcaataagtatcctgaattagttccctattttaaaaagtttataggttcagtagagtttattaatggtggtttacggtattgtttatggcttaatgaagcaaaatatgaaaaaataaagtctaatcctctaatacaagaaagaatctcaatttcaaaaaatcacagggaaaaatcaacagataaaggaacgaataaacttgcattaactccgtggaagtttagagatactcatgaaacaactaattattccattgttgttccatctgtgtcttctgaaaatagattttatattccaatgggattagcaggtgcagatacaattttgtcaaatctaatttatgtaatttacgatgcagaaatttaccttctaggcattttgatgtcacggatgcatatgacttgggtaaaagctgtagccggaagattaaaaactgactataggtactctgcaggtttatgttataacactttccctattcctgaattatcaacaagaaggaagaatgaaattgaagaagcaattcttgaaattcttgatcttcgtgaagagcagggtggtacattagcagagctttataacccttcaacaatgccaattgaattaaaagtagcacatgaaaagttggatggaattgtagaaagagcgtatcgtcaaaaacaatttgaatctgatgaagaacgcttagaagtattgcttaaattgtatcaagaaatgacagaacggtaggtgtaaggtgtatggaaaatataattgaaattaattataaccaaactggtaaaagtaagaaaacaaatgaatacggtatgcgtgaaatgcaggcaagagcttttgaaaaacgtaactcacaatatctcttagttaaagcaccgccagcttctgggaaatctagagctttaatgtttatcggtttggataagctcataaatcaaggtttgaggaaagtgattgttgctgtacctgaacgctctataggttcttcatttaaaaatacggatttaaaaagttatggtttctttgaaaattggaaagttgatcctagaaataatttaactgttggcggagataactctaaggttaaatcttttgttcgttttatggaatcggacgatcaggtgttaatatgtacgcactctactttgcgatttgcgtttgaaaaaattgatgataaagcatttgataattgtttacttgcaatagatgaatttcaccatgtatcggcagatgtcaattctcgattaggtgaattgttaagaagtattattcataattcatcagcacatattgtagcgatgactgggtcgtatttccgtggagattctgtaccaattttattaccagaagatgaggaattatttgacaaggtaacttattcctattatgaacaacttgatggatatgaatatctaaagggatttggtataggatatcacttctatcaaggccagtacacatcagctattaatgaagtattggatacaaataagaaaacaatcgttcatattccaaatgtaaactcaggggaatcgacaaaggataagtacgatgaagttggtaagatacttgatatgattggtgaagttgaatatcaagatgatgatactggaattatttatgttaagcgacattctgacggtaaaacattgaaaattgcagatttagtagatgaccaagttggaagagaaaatgtcgttgcgtatttgcgtaatattgaagccctagacgatttagatataattattgctcttggtatggcgaaagagggctttgactggccgttttgtgaacatactttgacagttggttatcgtggctcacttacagaaatagtacaaataattgggcgctgtacacgtgatagttacaataaaacctatgctcaatttaccaacctaatcgcaatgcctgatgcaaaggatgaagtagtgacttatacagtgaatacaatgcttaaagctatttctgcctcacttttgatggagcaggtccttacacctgactttaaatttaaacgtagaagaaatgaaagtgaaaaatcttctactacaggagaattattcgttaagggattgaaagaaccatcaacagaaaatgtcaaaaagattattgaaaatgatattaatgatttaaaagcaaaaatcatgcaagattcacaagtccaaaaaacatttagtggagaagtagatcccaaagtattgaacaaagtgttgattccgaaagttattcaaaaagtatatccaaatttatcagatgaggaaattgaggaagttagacagcacgttgttctagatacagttatgaaaggtgctaagtctgaagttgtaggaagtaaagaatttataagaatggcagataagtttataaacattgaggatttagatatcaatctgattgattccatcaatccgttccaaaaagcatttgaggttctatcgaaagaattgaactcaccagtgctaaaactgattcaggaaactattgatgcaaaacgtattaattttgatgaagatgaactagtattcatatggccaaaggtttaggaattttatcgttcaactggtagaagacctgattcaaaatctgaagacccacttgaaaggcgtatgggtgaagctgtattatacatgcaagagcttaggaggaaacgtgaaaatggcaagtaatagataccattctattaatgaaatcatggaaagtcagctgttttaccaaatcacaacaccacctaagaaaacacaaaaagcccagtatgatcctgaagttgaaaagtttttggagattattgaattcgtcaaagaaaatgggcgagaaccccaaaaagtccctactgatttaactgaaagaagtttagcaagtcgattaattgggattcggaaagatcctgatcgtatggaatatttgaaagagtatgatgaaattggattacttgaagtaagatcgaaggaactaacaattcctaaaatttcttcaattgatgatattctaaaaagtggcttatctgcattattaggtgataatttaaataatgatataactaggtcaatttttgatacaagttcacttcaaaaggttacgacaatgcctgaatacgttgcaaagcgtaaaaaaataaaagattttggaaagtttgaagagctattcaagaagtgccacaaggaaattacagagggtaaacgaaaaattttaactttcaaaaatgaacaagacatacagtcaaatagtttttatatattaaaaggagttcttctttatgttgaagatgtgggagaacgtaaaaaagcaaagggaaaaaccaatgctagacttcgatgtatatttgaaaatggaacggaatcagatatgttactacgttccttatcagcggagttatataaacatggtagacgtgtgaccgacaatgaagatacattgttggataatgttagagaagatgatgtttcgactggctttatttacgtactaaaatctttgagtacagatccgcaaattagttccattaagaatttatataagatcggttttacaactggttcagtagaaaatagaatcaggaatgcagaaaatcaatcaacttatctttatgctccagtagaaattgtaaccacatatcaagtgttcaatatgaatgctagcaaatttgagacggcaatccatcatgcgctagcaaataataatttggatgtttctattttgggggcaaatggaaagatgttagttcctaaagagtggttcgttgtcacacttgaagatttacaagctgtaatagatgagattgtgatgatggttcatctttatgactaaattagtatattaggattttagtattaataataattttatagtagactatgaaaaaatttgatgccataacaataacttgttccgctttggagtttgtcacaattgtagaattatgtgttgcgagtattaataggaaggggttgagcgaccgcaaaaaaaattttcggtgctgtccgcaaaagggagtttgggtgttttgcgttatatttggttgtgtgaaggttagcggaaactcaattcgtgaagttaggattgcggttattacgactgagtagtttcgtcatactcttttagcagtttttctgtcttatgcatttctttgagcatcggattcatgtagtcgttagctgattctagatatgctctcgtcagagtgtctagtttatttctaactttagagaggtcttcttcgaattttccatccgatgattgaaggataaattcttttgcctcttcatatctttttaatatgtttttcaccattggagttggattcttttgatttattgtttttattacagtgattgttaaatttatttgttttattaattcttttcttactgtcaaggtgatgctccttttaaatctctattctatttgagagttgctatatctgtttaatggtttgatagactactcatctttataatttagagcaatttttacaacttgttccgctgtgtaatcttcattgctccagaaaattaaatcacttggtgccggataaggaacatttttctctaataaatcgagatattcactgactttctcatcatctaatgttgggttcattaattcctttacaagaaagatcaactcttcttttgtcagtttatccattgtttgccctccaatagattgtatctccattgattttacaaatgactttatttcttctgataatgttataggttgtttgcataatgatagataattgtcttgagaaaagttagtctcattatagagtttattaattgtatttataacaatatattcatatggaaaacctctaaaatatctttattttagattggtttataaaaaatagctcagcagagtagggctgagccattttttaattatagaccgaggtaactaattacaaattctttatcatcctcatcttcaggcaaaataccaaggtttttatattcccatattgcgattctttcatatccatctaattctgaggctaaaatatcatcataattataatctaattggaattctccgctacgatccaatgttagtgtaaggttagtccaaacatcatcgttattatttctgtgttcagttcttaattcttcaaaaagttctcttagttctcttaacaacgtcttgaaaatatccttgcttacgttgtaatggctaggtatatcttgtgaataaataatttgattattttctggtgttctgaaatgaaaaagaaccattgtggaatcatctaatacttctgcataaagatatatctttgtccattcaccaggtatgatgtcattgagtttttctccaataagttgatacaaatcttgcatcttcctagtttccattcttctaacccccaggctgatttttaatagagacgcttatttcttttctgctcccaattttgtaggttacatcgaaatatgatggtctaagtgaatccccagaatagactggttctatttgaactgctacttttttaggtggttttttgcttagggcttttgcccactcctgctccatctcataccatttcccaccgctcctattaatctgagaattcatcggcacgatattgtcaaactggcctgagcctttgaattgggtggcgattaaatggccgccgtcatcgtcaggctttcggtcctggggctttccagcattcgtttgtgcatattggtttcgtttcgcttctcccagctgcaagtctgctttgacacttgtaattctaccatagttgtcagtcgtgtacgtgtagccttcttttgttttgtagatgatattaggcttcagcactttctttctgctccatcttgcgaaatgctcgccgtatttgacggttaccggcggtacatgtggcgctggagttcgtcttccgcttgatgacgttccgtatggtttcggcaggatgaccttggcgaatttttgcagtccttctttaagcgtgaccccgttgactgcgttgtaaggaacgcctgccggcactaaatcatgacggggatgatacgggagaatatccgcaagtgtgagatctccgatttgatttaacttggttttgacgtgtttttttgatacttcaatgcctgtgtttactttttgtttgatgtgatcaacggtttgttttgagactgttatggctttttgggctgttgctgatttgcttgctgctgttttgactttggtcgtcactttggcggctgtgccagtttttgagacggctcctacgccttttgtgccgacaattgatgtgacaacagtgccaaccgcatatgacacccatcttgctcttgagtaggtgtcaccattcaccatgtctttttgatacgattcttcgattgccgctgaaatggcttcatacgttttgatcgggtgagccatcgctccggtaatcgcttcaacggttcctcccggatctgtgaccatatcccacaggcctacgaccgcgtctttcccggaatcataaaggccgacggcaacccctttgaagcctgcttcaagctcacgcgtgttttcaatttgggtgaagtatctctgttgttcagctgtcagattttcatagccgatcgtttttgccatttcgtagaattcatcggcatctgcataatcgtagtttttcagtctttctttcagtttctcaatctcgcgttccttcgcttcctctttcttaatcttcaagtaagcctcagtccgcttttcaatgtcgccttttttcttatgtatgtcactctcacggtacgccttggcgttgtagtggatgggtgtggcgtttttgcctttacccgttgcttcttggagcttttggaagtcggatttgatgaattgttcgtttggttcagacagggcgtattctgttttcaggtcttcgtccaaggcgtccaatttttccagtgtttttttgcgtttgtcgttggcatcggccagctcgtctttgaaggtttctgttgaaaacaggtcgagcgggaggatgtcgtcgatatcgtttaggatgtctttcatcgcttttttctgttcggacatgatggatttagattttttattggcatttgccagttcgtgctccaggaaggattcttcgatgtatgcgtctgagaggcctttgtcttcggcggctccggcgatgctgttgaaaaatgcgattttcatgtcgatgtagtcgatccactggtcggcgacgccgacgtggtcgtgatagaatgccttgatgttgctggcgccttttcctgagaattcactgtcactgagatcagcgactccttttaacgcttttctcaagttgaccatttgcgttcttagttctttgtactcttttgcacggtctgtcgcttccgaaagcagtgttttcgcttcaaatactttcatgaccatttcccttcttttgttcgctcaatatcaaaattttaccacgggtcgggataaggtgggggtgagaacgtgttttggtggaaaaatgagtcatttggcatgtgtctttattcgtggagggattggaggaaacatggtcgaaatgatattgattgctacacattttttggaagtttgtattctatattgttttttaaggagcatgttgatgacgaaaaaacggattacatttggtttattagttttaatggtatgtgtcatcctgtttgttctgtatgttcagttacgcaataaagatagtattcctgtccaatcttccgccattcaccccgaagaagaccgcatcttttttatttactccaatcctttcataaaagaaagcgtgctgctttcaacctctacaggcgaacggtttaacaggcgtacgtttaaggtggcggatgtgccttatattcaaacgaaatcttatgcatcaacagaccttgtattattggcggaacacgagcctttttactacacgctggagaaggatgtgatcaaagagcatccgctgtcagatccatttgcgttttggtatgaggggaaggatgtcactattgaggcctataatgttgatacgacgggaaatgagatccacataaacgacagaaaaacgaaaaaggaatatacccttaccttgcctccgcttgtcacaatgggggccagtgatgagaactttatttatatcattcaaagcatgtctatttacgtgattgacagaaaaacagaggaaatgattgagaccctgagcttagcctcatacgctgatcaattcgcagactcggaggaatttatcgtcgcgagctcggatcataaattgactgtgattgaaaaagggacatggaagacgacatatattgcgtatcctgaagatcttgaatatgcagatactgtgtactatgacaaagaaagcggcagtttttacgtggcgtacgaggacaaagagggtggagcgaacttgctggaatatggggaggatttttctattcacacatacagcttgaaattcccttatatggaggcgaagtttaaggggaatctattgtatatagttgcccaggaagagcataaaaagggcatcggcggatacgtgggtgtgtttgatatccattctaaggagatgctttatcagtttgatttgcctgaggaacaggtgaaggttcaggattttgttgtggttgacaataagtgaatactatatgaaatagaatgacaaagacccttgcataaagggttcttttttatgaaaaaaacaaattgacaggatgaaaaaacaatttcttccttctatattgttttcaaaatttgggattgatagaatatgacatatctcatagagaaggagggaagccgttgagtcaagccataccgtcttcgcgtgttggtgttaagattaatgaatggtataaaatgattcgccagttcagtgttccggatgctgagattctgaaagcggaggttgagcaggacattcagcagatggaagaagatcaggatttactgatctattattctctgatgtgttttcggcaccagctgatgcttgattatttggagccgggaaaaacatacgggaatcgccctacagtgacagagcttcttgaaacgatcgagacccctcagaaaaaactcacaggtcttttgaaatactactctttgtttttccgcggcatgtatgaatttgaccaaaaagaatatgtggaagcgatcggatattatcgcgaggcggagaaagaactgccgtttgtgtcagatgatattgagaaagcggaattccattttaaagtggcagaagcgtattatcacatgaagcaaacccatgtgtcgatgtatcatattcttcaagccttggacatttatcaaaaccatcctctatacagcattagaacgatacaaagcttgtttgtgatcgccggcaactatgatgatttcaaacattatgataaagcgctcccgcatttagaggcggcgctggaattggcaatggacattcaaaatgacaggtttatcgccatttctctattgaacattgcaaacagctatgacagatcaggagacgatcagatggctgtagaacatttccaaaaagcggcgaaagtaagcagagagaaagtgcctgatctgcttccgaaagtcttgtttggattaagctggacattatgtaaagcgggccaaacacagaaggcgtttcagttcatagaggaaggattagaccatatcacagcacgttctcacaaattttataaagaattgtttctgttcttgcaggccgtgtacaaggagactgttgatgaacgaaaaattcatgatcttttaagctatttcgaaaaaaagaacctgcacgcttacattgaagcatgtgcccggagtgctgccgctgtttttgaaagcagctgtcactttgaacaagcagctgcgttttatcggaaagtgctgaaagcccaagaagatattctaaaaggagagtgtttatatgcctattaagaaaaaagtgatgatgtgtctggctgttactctagttttcggaagcatgtcgtttccaaccctgacaaactccggtggatttaaggaatcgacagatcgaaatacgacgtatatcgatcattccccttacaaacttagtgatcagaagaaagcccttagctagggctttttcttgctttacggaagacgttccattttccacatcgcggcattccttctatttctaacgcaagacactcgaaacaaccaaaccatttgaggtataatggataaagtgaataacagtatttagattgatatatatgaaagagagtggaacatcatgggccgtaagtggaacaatattaaagagaagaaggcgtctaaggacgcaaatacgagtcggatttatgcgaagtttggccgtgagatttatgtggcggcgaaacagggcgagcctgatccggaatccaaccaggcgctgaaggttgtgcttgaacgtgcgaagacttacagcgtgccgaaaaacatcattgaacgtgcgatcgagaaggcgaagggcggagcggaagagaattacgatgagcttcgttatgagggcttcgggccgaacggatcaatgattatcgttgatgcgctgacgaataatgtaaaccgtacggcgccggaagtgcgtgcggcgttcgggaaaaacggcggaaacatgggtgtgagcggatctgttgcttacatgtttgacgcgacggctgtaatcggtgtggaaggcaaaacggctgacgaagcgcttgaaatcctgatggaagcggatgttgatgtacgtgacattttagaagaggatgacagcgcgatcgtgtatgccgagcctgatcaattccatgcggtgcaagaggcgtttaaaaacgcgggtgtcgaggaatttacagtagcggagctgacaatgcttgcgcaaagtgaagtaacgcttccggatgatgcaaaggaacagtttgaaaaattgattgatgcattagaagatttggaagatgttcagcaggtatatcataacgttgatttaggtgagtaaggagtgagcaggctgttatggcctgctttttttgtcccggaaattgttttagctgtatgtaggcggccgcctatacgatctataagatattctcatactctggactgtaacctatgtgaaggagagagtaaatatgactgatacaagacatatgtatggcggacctggttttggtcattatcagggctttggtattggccacccgggctatggcatgcaaagcacaggctatccgggctatggcatgtatggaggccacccgggctatggcatgcaaggctacccagatcacggcatacatggaggagtcggcggctatccgggatatggtgggtacggcggttacccaagcggcggctatggaggctctccgggaactggaagctatccgagcatgcaccatgaaaatgatggccatcaccactattatcaccatcatcatgatggaaaagataatcttcatcaccatcatcaccatgttggaaaggataatcatcaccaccatcatgatggtcattatggccaccatcatcaccatatgggccactggggaaaagacggttataaataaagaagatgatgataaaaagaggacactcttgcagatcaagagtgtttttttagcttttttcttgactgttcagtctggaaaatggtaacatttgtttcaggaggtgatcattttttggggaggaataaagaatttgatacggcgcttgttcttcacagggcgatagaggtttttggagagtatggctacgaaggaacgtctcttcaggatctgctctctcatttaggcattgcgcgccaaagtttgtatgatacgtatggaacgaagcgtgatttgtttttgtccgctgtgaaatcgtatcttgaagggaaaaacgctgccgttatggaaaggcttgaagcgccaggatctgtaaaggaagccattcgtgatatttttcaggagggtgtcaatgccctgagggatccggaacgggcgaaggcgtgctacattattaacagcgcgattgaacagatcccgcatgaccctgagcttgcccggtattttgaaagacaatccaagcagcttgaggacgctttttatcacgggcttttaagagcgaaggatcaaggagaattgaatggcgaagatactgatatatctgcgcttgctcggtacctgaatcagagcaggctgtcactgacatttattgcaaaagtgacggcagatatggatcggcttcaggaccatgttgacgtgagtttatcagtgcttgattaacatgtggtaaaggattctttgcccatgtatgtactttttggactgaatagtctagaaataaaaatgaggtgatgatgaatgttgatgaatgagtttgaaaaagcatgtgaaacattgagaaagtttatggcttatatgcttgagaaggacatgaagagctggacggagctttgggatgagaatgctgtatttgagtttccttatgcgccggagggatcaccaaaaagaatagaaggaaaagcggccatttacgattatattaaagattatcctaagcagattcatctttcttcatttaccgctccgacagtgtaccgttcagcagactcgaatacggtgattgcggagtttcaatgtgacggccatgtgattgagactggactgccttatcgccaaagctatatcagtgtcatcgaaacgagagacggccgcattgtgcgttatagggattattggaatccgcttgttgtaaaagaggcctttggaggatcatttttgcaaacagaggagagtgggaaatgatgaaacagaatccgattttaatcacgggcgggaccggcacagtcggcagccgaatcgccagccgtttaataaagctgggatacagagtgcgtattgcaagccggaaaaagggcgcgcttgctgatgctgagtatgtgtattttaattggaagtacgcctccagttttacgcctgctctggaacaggtaaaacagatctatcttgttgctccggtcggtgtatttgatccggctccctatgtgcttccctttttaaaggaagcaaagcgtctcggcgcaaagcgggtagtgatgcaaagtgcgtctgttgtctccgagaacggtcccgtgtttggcgcgcttcaccaggcagtgcgcgagtttccagaatggacggtgctgcggccctcatactttatgcaaaatttcatcaatgtccagcaccgcatgtctattcaaacggaggggcgcatcacaacggcttcgggtgaaggaaaacttgggtttattgacgctgatgacatcgcagaaacagccgtcagggctttgattgatgatgttcctcatcaaacacatcatattctgacaggtcccgaggcgctgagctatgccgaagcggcggagatcattggagctgcggcgggacgccgggtggagcatgtcagcatttctcgttccgagctgcagcataaaatggaggcaggaggtttgcccgcggattatgcccattttatggcgaagcttgatgaggcaattagccatggtgcggaacatcgggtaacggatacagtgaagcgtgtgacgggaaaagaacctcgttcgctgtcagagtttgcggctgctcatgctgcatattggacctcattttggactgaatagtctagaaagaccttcggcgcttccgaaggtcttcttattgaaaaagctaagtcgtgttttagtcataatcatgcctcctgcctcatacctattaaggtcattgtttttgagaaaggaggagccggaatgaaggatatgcagccgtttacgcctgtcaaatcatatacgccctttcacagccgttttgatccctgtccgcccatagggaagaaatattacagaacgccccctaacctttatatgacctttcagcctgagcacatggagcagttttcgccgatggaggctttgaggaaaggcaccctttggaaggatctctatgatttttatgaaaacccttatcgagggggagacgcacatggcaaaaaaggttgacgccgaatattatcgtcagctagagcaaatacaggctgctgattttgtgcttgttgagctgagtctttatttaaatacacatcctcatgatgaagatgcgttgaagcaattcaatcaatattccggctattcaaggcacttaaaaagacagttcgaatcctcttacggaccgcttctgcagttcggcaacagccccgcgggcaaggattgggattggggaaaagggccatggccgtggcaagtataaggaggaatgcctgaatgtgggtgtatgaaaagaagctgcaataccctgtcaaggtcagtacgtgcaacccgacgctggcgaagtatttgattgagcagtatggcggagcggacggcgagctggccgcggctctccggtatttgaaccagcgttatacgattcctgataaggtcatcggccttttaacagatatcggcacggaggagtttgcccatttggaaatgattgcgaccatggtctataagttaacgaaagacgccacaccggagcagctgcgtgaagctgggcttggcgatcattacgtcaatcacgacagcgcgcttttttatcataatgcggcgggcgtgccgtttaccgcgagctatatccaagcgaagggcgatccgattgccgatttatacgaagatattgccgcagaagaaaaggcgcgggcgacgtatcaatggctgattgatatttcggatgatcctgatttaaacgattccctgcgttttttgcgtgagcgtgaaatcgtacactctatgcgcttcagagaagcggttgaaattttaaaagaagaacgggataaaaagaagattttctaataggcagattggcctctctttcatacacccttttacatacagagaaaatggtctgtttttgcagtttggtctgcattataatcaaggtgtgtgtgcaagcttactttttgattgggaggcctttatgacagcttttaagattgagaacgaaacgattgcagatggattttacgcgtgtccggccgtctatgaggatgcagaatcgattaccgggttgctcgtccgaacagctgaatggctccgggatcggggttctaaccaatggagcggacttctcaaagggcaagatatacatgatatcacggggtcaattgaaaagggacatgtgtttgtgtttaaaaaagatgaagagcttgcggctgtcgtgatgctgctgcctgcaccgagcgagtgggaccggacgctttggggagacgatgggcatgaggagtccatttatttacaccgcctcgcagtaagccgccggtttgcgggacaggggcttggagcccgcgtccttcagtgggcggagacgggcatacactttccggaaaaaacgcggatccggcttgactgtgtcgctgatagtgacgccctgcattccttttatcggcgtatgggatatgaattcatgggtgctgatgcgtccggatatcatttgtttgagaaagagattacggcagaataagcgtcctttgcagggggcttttttgtctttttctaaaagggaggcaggcgatgtgtggtcaatattatttgtgacagggattgtgacggcttgtctgtttgctggcgtatccgtattgatgcggatgagatttcctgacaaaagtcggccggaatggatgttggccgggctgatcgtccttggtgtgtttgcgatctggtacagcctcgtgtatgtacgcggctgggaaggggctgcgctcggaatgcttggattcaatgtcattttcggagccattgccggatatttgatcgataaggccatccggcgttacaggaaaagataaggctgctgccgtctctcaacaggtcgaaattttcacagaccggcaggaattttctttcgaaaggagaaatacatattactttaaaatgaaagcgttttccaaagcaggaaggtgatgttgatgatacacagtgtggcaaatgggctgaatcatttttgtacgtgggtgatgagactggcctatttgaatgtgctttggattttgttttctcttgcaggcctggttgtatttgggctgatgcccgctactgccgcgatgtttacagtggcgagagaatgggcgaaggggaatacagatgccccggtgttttctgtcttttttcggacgtttaaaaaggaatggcgggcatcacagatcctcgggcttatcgttgtgacggctgccctgtttctgtttgcggatatgcggatagcggctcagatggaccagcctgtgctcgtcaatgtattcgtgagcattagtttgattttcgcgtttgttgtgctgtatgtgttcccggtattttctcattttgacgtaaaaatcagagaggtgctgagcatcagctttttcattgccttcagtcgtccggcggtgacgcttttgatggcagcgggcgctgtcggtgtgctttgtctcgttctgtttcatgtcacgtttctattgtttttcagcgggagtttactcagcctgatcttaacgaagctgtcctttaaagcgtttcggtcaatggatcagcggcaggagaaagaaaaggcggcatgaagaaaagagttgctggctggtacaggcggatgaagattaaggataagctgtttgtgtttctatcgttgattatggccgtatcctttctgtttgtatacagcggggtccagtatgcctttcatgtgtatgatgagcagatttaccgcaagtcctcggaggtgcttcggatgtcttctgaaaggatcgaagacgagctgaagaagatagaggatgtgtcatatgaaatcattacagacgaacagattcagcgcatcctgagcatgcaaaatcgggatgatacgtatgatcaatatcaaatgaagcaggagctgtgggatcagcttgcgggatatgccagcgatgaaaagtacatcgattccattcatgtgattgatgcccgcggctcagagtattcagccggaagcagttcttcagatcttttgcagcaggagcaggaagaggtatttaagcgagcgaaagcgaaaagtggaagaaatctttggatgacgctcggcgggtcagaccccgtcctgatttcagcacggcagatcaggtcctatcaccagctgagtctgaacggcttgggcatggtactgatccaggtcaatgtaaaacagatgattcgtgatgtgccgaaggattggggcgattcagtcggagacattatgattgctgaccaaggcggtaatttggtgtatacggcacatgcatcagcgcatgttcctgaggcagcaaaagagacgttgaagcaccccggttatgacttgataaaaaagaatggcaaacgttactttatttcttatcttcaatcatcctaccaaaattggagctactataacgttatcccctttgatcagatgttcgcaaaaatttcctttatgaaaacagtgatcggcacatgctttcttctctttttctgtgtggttttgcttttcggaaggaaaatcgccaacagcatcacggagccgattgaacagcttgtgaccgcgatgaaatcggtacagcacagcggcattgaagcaggtgtgtcgctttctctgccggaacatacacaggatgaggccggcatgctgaaccgccattttactgtcatgatgaaacggattaatgagctgatggaagaaaatgtggaaaaacagctcatcattaaagaaaccgaattgaaagcactgcaagcccagatcaatccgcattttttatataacacgctcgagtccatcaattggctggccaaggcgaatcagcaaaagcaaatctcaaaaatggtggaatcgctcggttttcttctgcgaaacagcatacatatgaagaaggatatcgtgaccattcaggaggaggcggacattgtacgtcactatatgaccattcagcgatttcgatttgaagagcgcctgaaattcacgttggatattgacgatgaggtgaagcattgcctcattccgaaactgacgctccagccgcttgcggaaaatgcgattcaatacgcgcttgaaccctttacaaggccatgcgccatccggattcaggcgaaaaaggcgaagggctgtgtctgtattacggtcgaagataacggccctggcatggatggacggattcttgaatcaacgggtggaagaggaatcggactttggaatattcgcgagcgcatcagcctgacattcggagagccatacggattgcggattcatagtgagcatgaaaaggggacgaggattgtgatcacaataccgtgccgaaatgaggtggtgtgatgtataaaatactgctggctgatgatgagaggattatccttgatggaatggcgggaatcattgagtgggagtcgcttggcgcctcattgatcggaaaagcgcagaacggacatgaagcatatgaaaagattgtacataagcagccgcatatcgtcatcacagacgtcaaaatgcccggcatggacgggcttgagctgatcaaaaaggtgtcagccgtcagcccgtcggtgcaatttatcgtcctgtccgggtttggagagtttgagtacgcaaaggaagccatgaaatatggggtgaagcattatttgctgaaaccctgcaatgaacagcagattatcagctcgctggaggaaatcattgctgagctgaagcggcaagatgtgcacaaaaagaaaacagcccatctgaaacacgagctggaccatatccgttcctttgcagccgatcaatacttggaaggcttgatcgccggtgtggcccagctttctccgccgccttcacttgccggaaaaaagatccgcctcttgatcttaaaaggggaacaatctattgatgctgcagccagagaggcactcggatcggcactgacagcggtttgcagcagcggtgaatggaccgtgctcgccgtagaggagaacgccgctgaaaaggtggcggaggtttttgcggaccgcaagatggccatcagtcaggcgggagaactccggcacgcggggcagctgtttcgtgacacagctgaagcgtctggtgacctgcatgggagcgcagtgatttcaaaaatgatcaggcttattgccgacgagctcggaaatccgaatctgtccttaaaatgggcggcgaaggatatgctgtttatgaatcctgattatctcgggaagttatttaagcaggaaacaggcgagaaattttcccaatatgttacacgggtgcgtcttgagcatgcgatgaagcagatgaaaataaggagggacgtgagcgtttcagaaattgctgaagaaatcgggtttggcgataatccgaagtatttcagtcttgtttttaaaaaatataccggtctgacaccgtcagaattcagaagaaaacagggaggcgcttccgcaggatagccatctctgtttttttgactttcgccactgttttttgagtgtttcgccctatccgaacgctttaaaataaaatgtaagcacttacattaaaggggggattggtttgaagaagatttgttacgtgctgttatcccttgtctgcgtctttttgttcagcggatgttcagcgggtgaagaggcctcgggaaaaaaagaagatgttacactcagaatcgcgtggtggggcgggcagccaaggcatgattatacaactaaggtaattgaactatacgagaaaaagaatccgcacgtccatattgaagcggaatttgcgaactgggatgactactggaaaaagcttgcgcccatgtctgccgccggccagcttcctgatgtcattcaaatggataccgcttacttagcccaatacggaaagaagaaccagctggaagatttaacgccgtatacaaaggatggaacgattgacgtcagttcaatcgacgagaatatgctgtcgggcggaaaaatcgacaataagctttatggatttacgctaggtgtcaacgtgctgtctgtgattgccaatgaagatttgctgaaaaaagccggtgtgtctatcaatcaggaaaactggacgtgggaggattacgagaagctggcgtatgatcttcaggaaaaagccggtgtctacggttccaacggaatgcatccgcctgatattttcttcccttattatttgcgcacaaagggtgagcgcttttataaagaagacggcactggcctcgcgtatcaagatgatcagctgtttgtcgattactttgaacggcagctgaggctagtgaaagcgaaaacgtccccaacacctgatgaaagcgcacagattaaagggatggaagacgattttatcgtcaaaggcaaatcagcgattacatggaactactccaatcaatatttgggctttgcccggctgacagactcgccgctgtctctctatctgccgccggagcaaatgcaggaaaaggcgctgacactgaagcccagtatgctgttttccattccgaaaagctctgagcataaaaaagaggcagcgaaatttattaatttcttcgtgaataatgaggaagcgaaccagctgattaaaggcgagcgaggcgttccagtctccgacaaggtggcggatgcgattaaaccgaagctgaatgaggaagaaaccaacatcgtggagtatgtagaaaccgcgtcaaaaaacatcagcaaagccgatccgccagagcctgtgggaagcgcggaggtcatcaagctgctgaaagatacgtcagatcagattctgtatcagaaggtatcgccggaaaaagccgccaaaacgttccggaaaaaggccaatgagatattagagaggaataattgacgggaaatggggctgacgcaatgaaaaaaagccggagtataagaaaagacaatctggcgggatatgcttttatttctccgtttatcatcgggttcctatgctttacggtgattccgatgggggcgtccctgtttctgtccttcacgagctatgacttgtttacggcgccgaaatggatcgggctcgacaactttaaggaaatgtttacgggtgacgaaaagtattggcagtctctgaaggtgacgtttacgtatgtgcttgccggggttccgctccgcctcggcttcgcgctttttatcgctgtcattttaaacaatgcagcaaaaggaacggccatttacagaacgctcttttatctgccttcgatcatcggcgggagcgtcgccgtggcgattatgtggcgcaatatttttggcaatgacggggtcatcaatgcgctgctgttttttgtcgggattgatcaaaaaattctttggtaccagaatccgacaagtgcgctgtggacattgattctgctgtccgtctggcagttcgggtcgtcaatgctgatttttttggccgggctgaaaaacattccgtcttcgtatttggaagcggcaagtgtggatggggcaaatcgggtgcagcgtttcttcaagatcacgcttccgatccttacaccgattattttctttaacctagtgatgcagacgatttctgcttttatgacatttacacctgcctatatcatttcgaagggcgagggcgggccgcttgacgggacacttctctattcgctctatttgttccagcgtgcgtttaactattttcaaatgggctacgcatcggcgatggcgtgggtcatgcttgtcattgtcgggctgattacgctcatattgtttaaaacatcgtcatattgggttcattacgagtcaaaggaggaatgacggatggagccggtcaaccagcctgtcagagaagccccggtttttgagagaaaaaaagccgggcgcgtcagtcccaaacgcatactgttccatgtttttacggcaacgctggcggtgttgctgctgtacccggttatttggctgtttgtcagctcgtttaaagaaagcgccagtatttttacaacctcacattctctcattccagacccttttattctcagtaactatgctgaagggtggaagggcattgcgggacagccgtttctgacgtttattaaaaactcggcgattattgtcgggctgtcaacaatcggtgccgtcatgtcatcggctgtcattgcgtacggatttgcgcgtataccgtttaagggaaaaaaattttggtttgcgtgcatgatggggacgttaatgctgcctcatgaagtgttgatgattccgcagtatattatgtttgcgaaattagactggctgaattcctttaaaccaattgtcgttccgcaatttttcgggcatgcgttttttatctttctgatgatccagtttatccggacgattcccgaggagctggatgaagccgcgcgaatcgacggatgcggacgctttgcctgcttttggcggatcattctcccgctgattgcccccgcgcttgcgacgtctgcgattttctccttctattggaagtgggaggagctgattcagccgctcttgtatttgaataagccggagctttaccctgtttcacttgcgctgaagctttttctcgatacagagtcggcttcgaactggggcgcgatgtttgccatgtcagccgtctcgttattgcctgtgattcttgttttctttttgtttcagaaatatatcgttcagggcatcagtacgaccggattaaaataaaaaggagtgttgcagatggcacagcttatctttgatgaagaaaaggtgacgtcggttattgaccggatcgtgaaacggacatttcagatggattttgcgtgggattggccgggcggcgttgcgttttacggtgtggcggaggcctatgaagcgacggaaaacgaggaatatatcaatctgttaaaaacgtgggtggatgaacagctggaggatgggctgccgccgctttcgatcaacggagtttccattgggcatacgcttttgttcctccacaaggtgacaggtgatgacgtgtatttggaaacagcggccgagatggcggaatatgtgctgcataaggcgccgcgctttggcgagggtatccttcagcatacggtgaatgcggcagaatacgtattccctgaacaggcatgggcggatacgctgatgatggctgggctgtttatgctgagaatcgggcgggtcatggagcgtgaggattattttgaagacggcctgcgccagtttcacggacatgaggatgtgcttcaggaccctgtcacgaatttgtactaccacgcctgggacaacaaagcgcaaaatcatctgtcggggatttattggggcagggcgaacggctgggcggcactcacgatggcaaaggcgctcccgcttattgaggtgacacatccttcctttatgatcatcgacggatcgctcagagaccagctgagcgcgcttgtccggcttcaggatgaatcagggctgtggcatacaattttggatgatccggattcttatctggaggtttcggcatcagcgggtattgcttctgctctgatgtcgagcggaaagctgtatacaaaatatgtgcagaaatcgcttgccgccattttggatgcagtggaagaggacggacgggtcagcagggtatcggccgggacagccgtcatgaaaaatgccgaaggatacaaacaggtgccttacaaacgaatacaaggatgggggcagggacttgcgctgacgtttcttgctgatgttttgaaaacgaaaaaacgcttgtatcagtaaagatagcggcggggggagagggatgaaaaaacagcctcaacagaaggaacgggtttctcgctggaagggaacgtatttcaaaagaaactttgtcttcattttgctgattgcctgtattcccggattgctgactggcggcgcaatctactttctttcgatcgacaaggtggagaaagagctgcagagatcgcatgaaacacaggtggcgcgtgaggtcagccgaatggatgagaagctgggagtgcttgaactggcactcacccagatggcctacgattcttcactgatgaacggattggccgagagggatttggagaaagactttacgttctcctatcaattaacgaaaaagctgtttcttttgcgggatcagcagccgctgatcgagcaggcttccatctttctgaacagcccccggccacttgtgctgagccctgaatacagcgctttgacagaacaggaggcgcttcgcaagtatcgctcgctgcttgcctcagaccacagcatttattggaaacggtcgggaaaccaagcgatgctgatccagctcattccgggcgcggcggagaaaccgttcggcgcgatcatgctggcggttgatccgaaagaaatggaatcaatcctgcaaagcttgtccccctatcctgatggcagtgcgttgcttttagatcaaaatcgagaggtgctgtttcatgagggggaaaaagattttgaaaagactttacttcatgagataaaaaaacagcctgctgagaacggccattttcagatggaatgggaaggcaaggtgtattctgtctcctttggagaaatgaaccggatgcatcagcaatggacctttgtgtcagcggcgcctctttcagctattacagcgccgatggtgtttttatcaaaagtgatcatcgtgatgctggtcatttgcatcggtttggcggtgtgcatgacatggtatgcatcaaaaaaaatctatcgtcccatccagcatttgcttggcttgtttaccggaggagagaagaaaacatggcaggcgtccgggcaggatgaattcaaatggattgaaaagagatggcaggatctatcccttgaaagccggaagctccaacagcagctcctgcggcagacgccccatatgaaaaagagttttttgcagcatctcttacagagcgatttttactatgacaacgaggaaagcctcagatttcggatggaggaggctggctggaacatcggcggaaacgtgtttcatgtgcttgatctacaggtgacagggctccgctgtgaaaaaagcatcttccgtgaaggtgatgaacagcttgccgtgtttacactgactaatatcgctgaggaattggcggctaaacgcgtttttcagctctccatacttgatatcggccggctttctgtcaccgttcttgtgatgaaaacaaacagctctgatctgaaggcgtatataacggagctggcacgccaatttggagatgtaaccggactatgcctgacctcgacattgagcagcaagacggagcgtgtcacggaaattccttctttatttcaggatgtgaaatgcggcaaatcccgcaggaagtttgctaaccgggatcaggtcattgatttgcaggccgacttccctcgggatgagcagttcgctccttattacccttttgagctggaaaaacaaattgttcagaccatccggctggaaagaaaacaggaagccaaggaactgatagatggatgtatgaaggaactgtcggaaaaagcggccatagacaggcatgtgcattccgccctgattcagctgttttcccgcattcaggaggatattttgcattccgggctcaatcccagcgaactgtttcagcaccggaatccgtttcttgatatttcagaattgcgcgaacctaacgaagcggcggcctggctgatggatgtagtggtgacgccttacctttccaagcttgagggcagaaaaaacagacagcaaaagcagctggcagaacgtgtgattgcgatgattcacgaacagtatatggcggacatttcattggaaagctgtgccgatgcgcttggcatgaattcctatacgttaagcaaggcatttaagcaagtgaccggcattaattttatcgattatgtgacccagatcagaatcgaaaaggcgaaagaactgctggtcaatacgaataaaaaaattcatgatgtgtctgaagaagtcggctatcgccacaattatttcaatcggatttttaaaaaacaggtcggcatgccgccgggtgtcttcaggcaaatgtatcaggaaacgccgtgaaaggagagaacatgtgatgaagaaaccgattcaagtatttttagcgggggattccactgtgagtgactgcccgcctcatgaagcgccgatggcggggtgggggcaggtattcgggcaattgttttctgaaggtgtgctggtccgcaatcatgccaaaggaggagcgagcaccaattcttttgtggaggaaggaaggcttcaagcaattgccgagcacatcacacaaggcgattatttgttgattcaattcggccacaatgaccaaaaaccgcgggggacgaagccgtactccacatttcagcagtttcttaccttgtttgcagatacggcacgcgaaaagggcgcgcatcctgtgttcgtcacatcggtgcagcgccgccgctttgatgaaaacggacggatcgagcatacgctcggtgagtatcccgatgcgatgaaagcactggcgaaggagctcgatgtacctgtgattgatctgcttgcgaaaacaaaggtgctgtatgaagcatacgggccggaggagtcgaagcgattgttcgtttggtttcagccgaatgaacatccgaattacccggacggcattgaggacaatacgcatttttcggaaaaaggtgcaatggaggttgcgaagcttgtggcagaaggcattgaagagctcggacttccgcttaaggaccaccttgtgagccgggagggaaaagaacatgtataaggaaggcgcttgcttgtaccgcaatccgctccggtctaaaagcgatgtgaaggattggcggatggagggaggcggacagatctcatttgacgatcacagcttgcacctgtcacatgtccaggatgaagcgcactttgtcttttggtgtccggaaacctttccagacggcatcattgtgacatgggacttctctccgatcgagcagcctggactgtgtatgctgttttttgccgctgcgggtattcgcggcgaggatttgtttgacccaagtctcaggaaaagaacaggaacataccctgagtatcattcaggagatatcaatgccctccacctgtcgtatttccgcagaaaatacgcggaggaaagagcgttccgcacctgcaatttaagaaaaagccgcggtttccatctcgccgcaatgggggccgatccgctgccttctccagacgacgctgattctccgtatcgtatgaagctgatcaaagacaaaggctatgtgcacttttcaatcaatggtctgcccattcttgagtggatggacgacggcagcacatatgggcctgtgttaacaaaaggaaaaatcgggttccggcagatggcccccatgaaagccgtttacagggattttgccgtgcatcaagcggtgagaagatgaagacgactgtaacggatgcgctttatgcaggctgcgaagcggtggtgaaaatagcatggctcaacgggctgtggctgttgtttacacttttgggcggcgttcttttcggatgggcgccgagcacagctgcgatgtgtgccgttataaggaaatggctgatggggcaaaaggatgtcccgatattttcgttatttctcgatacctataaaaaagagtttctcaaggttaatgcgatcggattggcgttttcggctcttttgctcatattgtctgccaactatcattatttttctgccagtacgaattggctgtcctttgccgtaacaagctgcacgctgcttgcagggcttttgtatatcatcgcgctgatgtatgtgtttcccctttatgtgcattaccagctcccgcttcgcaaatatattccgcaggcactgctgtttggcgccatgagaccgctgacaactggctgtatgctgatcgggtgcggatttgtcctttatttgctgtatacgcttcctggcctgatcccattttacggcccgtgtttatttgggcttgtgttgatgttttttgctcttaggggatttcaaaagacggaggcccagcaccatcaagccgggtaacaaaaaaatgacaaataagcaaaaaagtgcagtgtccgaaataggcagatgcaaaaaagtgaaattgaagacagctcacaaagcgcataaaatccaatttaagtaagcgcttacagataaatgagaaggagctgtctgatgattagacgaaggaaacgcatgtttaccgctgttacgttgctggtcttgttggtgatgggaacctctgtatgtcctgtgaaagctgaaggggcagcgcggcagatggaagcgctgaaccgggggcttgtagcggtcaagacggacgggggcatttttgtcagctggcggtttcttggaaccgaaaacgcatctgttttgttcaatgtgtacagagacgggcaaaaactgaatgctgcgcctgtcaaaacaacgaactatgtggataaaaacggttcggcgggctcaacgtatacggttcgggctgttgtaaacggtaccgaacagccggcttctgaaaaagcctccgtatgggcgcagccgtatcattccgtcccgctggataaaccggctggcggcacgacgccaaagggtgaatcttacacgtacagcgctaatgacgcaagtgttggcgatgtggatggtgacgggcaatacgagctgatcctgaaatgggacccgtccaactcaaaagacaattcacaggatggctatacgggtgacgtgctgattgacgcgtataaactggacggcacaaagttatggcggatcaatctcggcaaaaacatcagagcgggcgcgcactacacccagtttatggtgtatgaccttgatggtgacggaaaagcagaagtggcaatgaaaacggcagacgggacaaaagacggcacgggcaaagtaattggaaatgccaatgcagattacagaaatgaacaggggcgtgtgctttcaggccctgaatatctcactgtgtttcaaggttcaaccgggaaagagcttgtcaccgcaaattttgaaccggcgcgcggcaatgtgtcggattggggagacagctacggcaaccgtgttgaccgttttctcgccggcattgcctaccttgatggacagcggccgagcctgatcatgaccagagggtattacgctaaaaccatgctagttgcctataacttcagggacggaaagctgtcaaagctttggacgctggactcctcaaagtcaggaaatgaagcgtttgccggacaggggaatcacaacctgagcatcgcggacgttgacggggatggaaaagatgagattattttcggctcaatggctgttgatcatgacgggaaaggcatgtactcgaccggcttaggccatggggatgccctccatacaggagatcttgatccgggccggccggggcttgaggtgtttcaagttcatgaggacaaaaatgcaaaatacggcttatctttccgggatgctgcaactggaaaaatcctttggggcgtttatgccggcaaggatgtaggccggggaatggctgctgatattgacccgcgttatccgggacaggaggtgtgggcaaacggttctctctactcagcgaaaggggtcaaaatcggaagcggggttccgtcctcgaccaacttcggcatctggtgggacggcgatctgctccgggaacagctggacagcaaccgaattgataagtgggattatcaaaacggcgtatcgaaaaatatgctgactgcatcaggcgcagcggctaacaacggcacaaaagcaacaccaacgcttcaggctgatctgctcggtgactggcgcgaggaagtggtgtggagaacggaggacagcagtgctctgcgcatttacacgacgaccattccgactgagcacaggctgtatacgctgatgcacgatccggtgtaccggcttggcatcgcctggcaaaatatcgcctataaccagccgccgcacacaagcttctttttaggagacggcatggcggaacagccaaaaccaaatatgtatacgccttaactgaaagggggaaggaacgggctgcgcgcagcccgttcccatcaaatgaaaccaaaaaagaggcaaatggaatacctgaccagaggtttgattgcggtacagacagaacagggcgtgtttgtcagctggcgttttctcggcacggatcatgagacgacggcttttcacctttatcgggatggaaagcggatcacccgcgatccaatcgctgaaagcactaattttctcgatcaaaacggaacggctgactctgtttatcaagtggcggctgtcaataaaggacgggaagaaaagctttccaagaaagctcgtgtttggcaggaaaatgtcctggaggttcctcttgccaaaccggaaggcggtgtgacgccggacggaaagccgtacacttacagcgccaatgatgccagtgtcggggatatagacggggatggagaatatgaaatgatcctgaagtgggacccgtccaattcaaaagacaacgctcatgacggttataccggggaggtgctcatagatgcctataaactggacggcacctttttgtggcgcatcaacctcggcagaaacatcagagcgggtgctcattacacgcaatttatggtgtatgaccttgacggtgacggaaaagcagaaatcgccatgaaaacagctgacggcacaacagacgggaaaggacatatcatcggtgatgagcaggccgattttagaaacgaacagggcagaattttgtccggtccggaatatttgaccgtgtttaaaggagaaaccggtgaggcgctcacgaccgtggaatatgaaccgccccgcggcaagctggaggattggggagacggctatggaaaccggatggaccgttttctcgccgggaccgcttatttggatggggagcggccgagccttgttatggcgcgcggctactatacgagaaccgtgctcgtggcatacgatttcagaaacggaaggctcaaaaaacgatgggtatttgactccaaccagccgggacatgaagcatacgcaggacaggggaaccacagcttgagcgtggcggacgtcgacggagacggaaaggatgaaatcatatacggcgcaatggctgtcgatcatgacggaaccggcctgtactcaacgggcctcgggcacggagacgcgatgcatgtaggggatctggacccgtcacgaaaagggcttgaagtgttccaggtgcatgaggacgccacgaagccgtacggactgtcgctgcgagatgccggaaccggtgagatattatggggcgtccatgctggaactgacgttggccggggcatggcggctcatattgatccaagctacaaaggatcgctcgtctggggaattgatccgccgggcaatgatggcatgtcgtacgggcttttcacgagcaaaggcgaaaaaatcagcgacaaagcgccctcttcagccaatttcgccatctggtgggacggtgatttggtcagagaactgcttgatcatgactgggacggaacgatcggcaggccaaagattgaaaaatgggatgctgaaaacggctgtctgaagacgatatttcagccggccggcgtgttgtccaacaacggcacgaaaggaaacccggttcttcaggccaacctgttcggagactggcgggaagaagtgatatggagaacggaagacagcagcgcgctccgtatctatacaacaacacatctcacccgccactgcttttacacgctgatgcatgatccggtttacaggctcggcatcgcctggcagaataccgcctacaaccagccgccgcacacgagcttttacctcggaacgggaatgaaaaaaccgccgaagcccgccctgtacatagcgggaagcaaagcggaggcgccgctgtaggaggactaagggataagacgcaaaggctgaacgctacgccaagatgattagagaactggcaggacgaaccaatgctcaagcgctgtacgcaccggttttttcaagggaagagctatccgtgatggaagctgtataaaaaacgaggaggaatgaaaaaatggcaaatcatatttatcttgccggcgattcgactgttcaaacgtatggagacagcacaaatcaagggggctgggggcagtttctcggctcgcatctgccggagcatattcaagtgatcaacagagcgatcgggggaagaagctcgaaaacatttgtggaagagggcaggcttcaggcaatcctcgatgtgattgagccggatgattggctgttcgtgcagatgggccataatgacgcgtcaaaaaataagccggagcgctacaccgagccctatactacttataaacaatatttaaagcagtatatcgcaggcgcgcgggaaaaaggcgcccatccgcttctcattacccccgtagcccgctttcattacgaaaacggcgtgtttttgaacgattttcctgattactgcattgccatgaagcagacggccgctgaggagaatgtccagctcattgatctgatggagaaaagtctcgctttctttactgagaagggcgaggaaaaagtgtacacctattttatgatttcagaagggattaacgattacacgcattttacaaaaaaaggcgcaaatgaaatggcgaaacttgtggcaaaaggcataaaggagctcggcctgccattgacagaatcgatcatcaaagaaaggtgaaaatgtgatgagaaaactgtatcatggcgcttgctattatccggaattatgggatgaagagacgattcagcaggacattgacatcatgcgtgaagttggcgtaaatgttgtgcggatcggcgaatttgcctggtcagtcatggaacctgaagaaggaaaaattgacgtcggttttttcaaagaaatcatcgcccggctgtatgatagcgggatcgaaacgattatgtgcacgccgacgcctaccccgccgatttggttctcacatggccggcccgaacgcatgcatgccaatgaaaaaagagagatcatggggcatggctcccgtcagcatgcctgtacgaacaacccgtatttccgaaaaaaagccgccatcatcaccacagccatcgccaaggagcttggccggctcccggggctgatcggatggcagctagacaatgagtttaaatgccatgttgcagaatgcatgtgtgagacatgcttgcgcctatggcatgactggctcaaaaatcgctacggggtaattgagcgcttgaatgaagcttggggaaccgatgtgtggagcgagacctatcagacgtttgagcaagtcccgcagccgggaccggccccgtttctgcatcatgcctctctacgcactatgtatcagctgttttcgatggagatgatcgcttcgtttgcggatgaacaggccaaaatcatccgctgctattcagatgcgccgatcacgcataacggatcagtcatgttcagcgtggacaatgagcgaatgtttcagaatctcgattttgcctcctatgacacgtacgcttcgcaggaaaacgcctctgcctttttattgaactgtgatttatggagaaatctgaaacaagggcgcccgttttggattttggaaacgagtccgtcgtatgccgcctcgcttgaaagctccgcttacccgcacgcagacgggtatttgcaggccgaagccgtatcgtcctacgccttagggagccaggggttttgctactggctatggcgacagcagcgttcaggcagcgagatttcccacggttcggttctcagtgcctggggcgaacccaccatcggctatcaaaatgtgctggcggttgagcgggcaagaaaggaaatcgagcctattattctatcgactgaacccgttcaagccgaggcggcgatgacttactctgacagagcaaaagcatttattaaaactgagcctcaccggggactccggcatcgttcgcttgtgacgcatttttatgaacgtattctcaacacggggattcaccgtgaccttattccggaaggcgctccactggacggctatcgcttgctgtttacgccatttgtgccgtatttgtcttctgaatttatcaaaaaagcttcggcattcgctgaagcgggcggcatctggatcaccgggccgctgacaggaggacgcacatgcgagcataccattcataccgattgcggacttggcgaacttgagaaaacgtcagggatcaaaacactttttacctttccgatgaatgagaacgtgaatacaggaaaagcgtttggcatcacggcgccgctcggactgtggagcgcggtgtttgacacagagagcggaaacacccttggcacggttgaagcaggaccgggggcgggccatgcttttctgacggaacggaattacggcgaggggaaaattgtcatgctgggctcgcttccatccgggaaagaaggggatgcgatgctggaagcgctcgtcaggcattatgcggaggaagctgttatttccagccggtcggatgtgacacccggcacgatcgttgccccgcgtataggcgaaaacggccttgtgtggatcgttgtgaatatggatggaaaaggcgggagcgtgacattgccggaatcgggaacggatttgttgacgcaccgcttggaaaaggcggggagactggcggtcggaccgcatgaataccgtgtgattcaatttgacaatcacagctgattctttgtatcgaatcagcttttttctatggagggagagacagatgaaaaagatcaaatggttatcaggacagccaaaggtgacaagcggcgtgacgtggggcatgccatggaaaaaaggagaattaaaaaaaggagaccgtctggcgcttatgaatgaaaacgcggaaacgcgatatgtgcaaagcgaaccgtcggcctattggccggacgggagcatcaagtggacgaagcacgcggcggtgtttggcggtcaggaaaaccaaagctttacagtgcacaaaagagaagtgccgcagccaactgaatcgctcagcattcttgagacagagcatgatatccaagtggatacaggagcactcgtttgtaccattcataaaacaggatctgatttcattcaatcattgcagatcaatggaaagccgatcgccgcaggcgggaggctcgttgcgataagagaaacgagaaaagagtcagcggcgaaaatggttcttttgcatgaaaggtctgtcagctttatcaaacgggcggcgattgagcagagtggtcctgtcaaagcagtagtcaaaatcgagggagtgcatgtgcttcataaaacgtatgaggaatggctgccgtttgtcatccgattaacgttttatgccgggctgtctgagatcggccttgtgcacacgcagctgattgacaggagcggtaaactagaattcgttaaggggctcggcatcgaattcgacctttttttggagggagagccgtacaaccgccatttccgctttgcgggagagaaagggatgtataaagaacccgcccagctgtttggcacacgtaaattcaatgaacgatatccgctttatgaaaaacaaatcaatggcgaaatgctgtctccagatgaagagcataaggaatggtttgcacatggcacacagaatgcggtttgggacgatgtcaagatcgtgcaagattccagcgatcattacagcctgtcaaaacggaccggaaaagattatgcgtgggttggaatgctgcatggcagccgggcgaaggggctctgctatgcgggcggaaaaaatggcggtgtggctctcggcctgcggtatttctttgagaaatatccttcagcactggaaatcacaggtcttgccggcagccgccccaaaatgactatctggctttggcctccggacggcgaagcgatggatttgcggcattatacaggaaacactcacgtggccagcgcgtatgaaggctttgatgaaatgcgctctgatccgacaggcattgcgaacacaaatgaaataagcctggcgtgcttttcgcacatgccgtctgacgaagtcctcaatgcgctggctgacaaatggcaggcgcccccgctcattgtatgcgagccggacgtctattacgaatcaaaagcactcggggtatggagcatcattgacacatcccatccgctcaaaaaagagctggaagaacagcttgatgcggcctttctgttttataaaaaggaagtagagcaacgcagatggtacggtttttggcattatggcgatgtcatgcatacgtatgacccgatccggcatatgtggcggtacgatctcggcggatacgcatggcaaaacaatgagctcgttccgaccctatggctgtggcaggcgtttttccgctcaggcagagaggatatcttccgaatggcagaagccatgacccgccatacgagtgaaacggacagctttcacctcggtgaatatgccgggcttggctcacggcataatgttgtgcactggggatgcggctgcaaggaagcgagaatcagcatggccgggcttcataaattctattattatctgacgggtgatgaccggacgggagatcttttgacagaagtgaaggatgccgattatgcccttgtcaaaaccgatccgatgcgcgctttttacgagaaaggcaagcacccgactcacgccagaacgggaccggactgggcggcgttttgctcgaactggctggcggaatgggagcggaccgaaaattcggaatatctcaaaaaaatcgaaacgggaatcaactgtctgaagcggctgccgctccgcttattatctggcccgacatttgaatatgatccggcgacctcgatgcttcatcatatgggagacggcattgcgggcggatatcatatgatcattgccttcggcgcgccgcaagtgtggatggagctggctgagcttcttgatgactgggaatgggaggatatgctgagtgaattcggcgaattttacacactcagtgatgaggaaaaacgaaaaaaaagcggaggcgctcttcatgacgggcattttcactggccgatgttcgccgccggtatgacagcctacgccgcaagaaaaaagcaagatcctcatctcgccgccaaagcgtggaatcttttgctagaagataagctcagccatacgccgcttccgatcaaaccggagcgcatcgagacatggacgcagctagaggagcttccatgggtgacaacgaacactgtctctcaatggtgtttaaatgtcatagcggcgctggaactgatcggagattcccttccggcaaaaaaagaaacatcgggcaaaaaaggataacagccggaatttcataggagaaatggtgcaaaaaatgaagattgcaagaatttatgtaagcgctttatattgagaggggcaaaggggaaatgcaaattgaaaaaagggggacttacgcaacatgaaaataagaatgcgaaaaaaatggatggccttgccgcttgctgccatgatgatcgccggatgcagccattcggaaacatccaattcagcaagcggttcgaaagatacgatcaaaattatggcgccgctcttatcgccggaaagcccaagtgataagagcccttcattaaaagcgctcgaaaaatacacaggcaaagagattaaggtcacatgggtgcctgattcatcctacaacgacaaattcaacatcgtcatggcttcaggagagatgcctcacgcgattgtcattaaagataagtcagccggctttatcaaatctgtcaaagcaggggcgttttgggagctgtctccttatttaaaagactacaagaatttaagccaggcagatgaaaagattttgaagaacagctcggtgaacggcgaggtgtacggaatctacagaacgagggatctgatcagggcgtgtatgatcatcagaaccgactggctgaaaaatgtcggtctggatatgccggaaacgcttgatgatttctatgaagtgctgaaagcctttaaggaaaaagatcctgacggaaacggcaaggatgatacgtacggcatggtcgtgccgaaatggatgggactcggcaacggaagcccatgggatgttctgcaaatctggttcggcgctccgaaccgctacggtgttgaaaacggaaagctgattccagattttacaacgaaggaatacatggatgcgctcacgttttttaaaaagctctatgatgagggcttgatcaataaggactttgctgtcatggattctgcgaagtggaatgatccggttgtaaaaggaaaagcgggtgtcatcgttgatacaggctcaagagcgtctcaaatccaaagcgcgatggaggaggcggatgagtcgaacaaggatatcattgatatcgtcggctcgcttgagggaccgaatggcaagcgcaccttcccgacatctggttattcaggcatgatcacgataccaaaatcaagcgtcaaaaccgaaaaagagctgaaagaggtgctgtccttcctcgataagatgaatgataaggaagcgcagattctcacgaacaacggagtgaagggccgcaattacgagctcaaggacggcgtattcacctcacttgaaaaaaacaataaatctctcctgtatgagcatgaaggcttggcacagttcagcatgtcgattccgaaaagcgagtattacatcgaagaccagaaaaccaagctcttccagcatcgcaaggacatcataaccgaaggagaaaaaatagccgtctttaaccctgctgagtcgcttgtatctgatgtctatacccaaaaaggagcccagcttgacaacatcatcctcgacgcgagaacacaatttatcattggagaaattgatgaaaaagggttcgatgatgcggtggagctttggaaaaaaagcggcggcaatgaactgatgaaggacttgaacaaattgtaccaatcgtcaaaataaaccgatgcgcctgcctttcggcgggcgccccggtatcacgaaaggagaacagatatggaaacagtgccgaagaagagagatgcacctgttctcaccgctggaaaaggcatcagctggatggctgcgctcaaacgggacaaatggctttatcttcttcttattcccggtctgctttatttcttgattttcaaatacttgccgatgtggggtgtgctgatcgcttttaaagactattcgccatatctcggcttctggaaaagcgaatgggtcggctttgattatttcaaagacttttttatgaatccggattttttccggctgctgcgcaacaccctcatgctggcgagtctggatcttttgtttgcctttcccgcgcctctcattttggctctgcttttgaatgaggtaagaaaggccgtgtataaaagatgtatccaaacctttatttacgtaccccattttgtatcatggacaattgtggtcagcatcaccttcgttttctttactgtcgatacaggtgtgatcaacaaattgattatgagcctgacaggtgagcagatttctttcttgtcggatgcagactggttccggccaatgattgtgatgcaaagcatttggaaggagacaggctggggaacgattctatttttggcagcgcttgctacggttgatcaagagcagtatgaagcggccatcatggacggagcggggcggttcaggagaatgtggcatattacgctgccggcgattagaagcaccattatcgttttgttgattttaagaatcggcagctttttgaatcttggctttgaacaggtgtatttgatgacgaactcactcaaccgcagtgtggctgacatcttcgacacgtatgtgtacatgatggggattacccaaggggcgtatagctacagcacggcggtcggtttgtttaaatcagttgtcgggattatcttgatttttggcgccaattacattgcgaaaaagtttgatcaggaaggattgttttagaggagggagaggtatggctgaaattcacacgatgcacaacaccaaagccggacgggtgtttgacgtctgcaacattctgtttctcggcggtgtcggcgcgattaccattttgccgtttttatatattatcgccggttcctttgcgacagaagcggaactcgcccagcggagcttctttattttcccgaaaacctttacacttgatgcttacaagtatgtgttttcgacaccgacgttccttcgaagcatgggcgtgtccatcttcatcacggtggttgggacggctgtacagctgttttttaccttcacgatggcgtatccgctggcgaaacggcatgtgaagggacggaatctgctgttgaatctggtgattttctccatgctgttttcaggcggcatgattccgacgtaccttgtcgtaaaatcacttggccttttggatacgtattgggcattgattctgccgatggcgattaatccgttcaaccttattattatcaaaaacttctttcagcagctgccgcgcgagctggaggaatcagcaaaaattgacggctgttccgaaatcggcgtcttctggcggatcgccctgcctctgtcaaagccagttattgcgacctttgcgctgttttatgcggtcgggatttggaatgatttcttccacgctctcttatatatcaatgacagtgcaaaatggccgctgcaaatggtgcttcgccaagtcacaattttatcggatttaacggcgaccaatggtgatacgatgcaaaatgcagttccgccggagcagggaattaaactcgctgtcattgtcattgcgacgctgccgattttggcggtctatccatttttacaaaaacactttgcaaaaggaatgctgatcggttcggtgaaaggctgagaaagggagtgtttcatatcagtacattagatcagattaagattgcctatatcggcggggggtcccaaggctgggccagaagcctgatgagtgatttgtcgattgatgaacggatgtcaggcacggtggcgctctatgatcttgattttgaagccgctcagaaaaatgaagtgatcggcaatcacagcgggaacggcagatggagatatgaggctgtttctactttgaaaaaggcgttatcagccgcggatatcgtcattatttccattttgccgggatcactggatgatatggaagtcgatgtgcacttgcctgagcgctgcggtatttatcagtctgtaggtgatactgtcgggcctggagggatcatcaggggcttgcgtgctgtgccgatatttgcggaaattgcccgggcaataagagactacgcacctgaatcatgggtcattaattatacaaacccgatgtctgtctgtacaagagtgctgtataaagtgtttcccggcatcaaagcgattggctgctgccacgaggtattcgggacgcaaaagctattggcggaaatggtcacggaaaggctggggattgaggtgccgcggcgtgaggatatccgcgttaatgtgctcggcattaaccattttacatggatcacaaaagcctcttaccgccatattgacctgttgcctatattccgtgaattcagcgcgcactatggggaatcaggatatgagctggagggggaatgctggagggacagcgtcttttgttcggcacaccgtgttgcgtttgatttatttgaaacgtatggcgccatccctgctgcgggtgacaggcatctggcagagtttcttcccggcccatacctcaaacagcctgaagtatggaaatttcatctcacacctatatcattcagaaaacaagacagagctgagaaacgacaagaaacagaacggttgatcgtgcaacaacggggcgttgctgagaaagcttcgggagaagaaggcgtgaacatcatagcggctcttctcggattgggtgaactcgtcacaaatgtaaatatgccgaatcaaggccaggtcttaaaccttcctatacaagccattgtcgaaacaaacgcattcatcacaaggaaccgtgtccagccgattttgtccggagcgcttccgaaaggtgtggaaatgctggcggctaggcatatatccaatcaggaggcagtggcggacgcaggtttaacaaaggatactggcctcgcgtttcaagccttcctcaatgacccgcttgtccagattgaccgcagtgatgcagagcagcttttcaatgacatgctccaatgcatcatgcaaagctgagcttgccgattagctctttccggtttagaaaggaaagcattgaccatactgatagtataatcaagaagtaggtgctatcaatatgggaaattatttaagtgttgcggtagaactggtctgcggtttaggcattttatttatcatcttaaagcttctcgggaaaacccaattttctcaaattacgccgtttgactttatttctgctttaattttaggtgaattggtcggaaatgccgtctacgatcatgaaatcaaaatcaaagaaattatttttgcttcgctattgtggggcgtgctgatttatattattgaatttatcacgcaaaaaatgaaatcatcgcgaaagttcttggagggcgagccgaatatcgtcatccgcaaaggggagcttcaatataaagtaatgaagaaaaataagatagacattaaccagctgcaaagcctattgaggcaagctgggagcttttcgatccaagaagtagaatatgcgattcttgaaacaaacgggatggtcagcgtgcttccaaaatcagactttgacaaaccgacaaataaggatttgcagattccttcgaagtccgtttctctgccgatcacgttaatcatagatggagagattgtgcgggataatttgaaggaagcaggtgtggatgaacagtggctgaaacaagaattgaaaaagaagaacattgataagacagaggacgtgttatttgcagaatggcataaaaataagccgctgtatactgtaacgtacgaacaaagcagatcaacatgactcttagaaaaaagcttgcagcaaggcgcaagctttttattgattgtatgtcccttgtttgacagcacgtacatggtacatgctcacttcagtgctgatcagatagtcaggctttggtttgcctttgtttgctttatggccggcgatatgcgcatcgcttttttcccattgcttccagtgatcctctgattcccagcgaatcatgacaacaacttcttcatcaccgcggcgcacatttttctcaagcactgtcacatcaattaaaccttcttgtttttcaatgattccttcagcgctgaaacgttctatgactttatctgcaaagccttctttaaccgtcatttttctcaactgtacaaacatttgtctcactccaatcattctcacatatgaataattgtaaatgaaattcattctcaatgtcaaagaaagcgcagggcggaatcgaaccgccgtgcgcaacagtttattcttttaataaaaacacatttccgtcttcgtccttaaattgaacgaaggtgccccactccatttgattgggctcaccgagaaattctacaccgtttgtcttcattttctcgtatgtaccaaagatgtcttcgcattcaaacacaatagaagccttcatttgctctgagcctttcatcatggctttcgggtaaatgactaaacgagtctcggctccttttggcgcaacctccagccagcttgcttcaggtcccattgggtgatccgctgcaatatcaaagcctaccttctctgtccaaaattgcttcgctttctgctggtcctcgacatatacagcaacagtgccaatttgtttgatcatagggaaacctccaagttgaaaagataataatactataacctgtttacggccgaagtaacataaaaaaatcagccgggaaaccggctgattattaaaatgagcagcttacaacatcgatgtgatttgtgtctaaggcgaaataaacccagcggcgccgtgaggaatcccaataaaagccgccgacggatcttctgccaaggatgatcgggtaaaaccaaaatgagcggccattggttaaccagacataggtaaatcggaaaaggcaaggacgaatggtgattggttcaactaacaaaacggctccttgagaaccctgcggttttgggggtttcgctggtatttgggaaggaggaggtccctgcggcgcaccgccgaagcctgggctggcaccgctgccaataccagggccggagccgccgccaaagcctggaacagcaccaccgccaatgccaggaccggagccgccgccagagcccggaacagcgccgctgccaatgccaggccatggatatcggtattcatattcaaaagcaggccaaggctcataaaaatgccccgcaaacatataaggatcaacataatacatgtgataacgtcctttctcattgtaaactgtacattgcagtttatgcgggcggactcttattggtgcattcgcctaaggatatgaagctggaatgctctcagagagcagaatcatttgatttttctctagtcttattcacaattccgatttatcattttataatgaaagtgcttctattacgaaaaaggagacagaccgtgaatatcgatcaattattatatcaatatatcatagacaacactgcggatattactgagaaatggttcagtttgcgttgccagctaaaaggcgagctatattccgccagccatttaagtgaagaaacgaaaacacttttaaccgagcagcatacatttaccaatataacaatcgcaagcgcatttctggaggatcaaaccgattttcaagaaaacatgacaaaatgggcgcaaaacgttgcgaaaaacagggtagagcaggatgttcaagtgcatgaggtcgtagaagccatatccaattcaagaatctcattctgggacgcagtcgccacatttataaaagagaatcaggagattgtgacaaatgaggatgcagaccgatggaaccgcattgtgaatcagtcgttcgataagctgattattgaattctccgagcagtaccaaaaattcatgctgatgaggcttacatctcagcaggaactgatctcagagcttggctgcccggtcatttccattgccgatggaatcgggatattgccgcttatcggctccattgatacaaaacggcacaggtcattttagaaacagtgccggtccgctgtgtcgagagaaaaatcacaagcctcgtcgttgatctttcgggtgttccgattgtggataccatggtggctcagcaattgtacaacctgtctaaaacacttttcttattaggcgtcaaagccgtattttcaggaattcgcccggatgtggcccaaacatcgattcaattggggcttgattttagtgaatatgaaacgtacggcacgctgaagcaggcattagaaaacatgggtgtccgctgtattgttgaggaattggaagaaaacaaataggaagtttccaggcatatgattgtccgtcaccgggtgatcatatgcctttttgatttgaacagaaatcaccattgatttatcgaaaaaaacataatattataattcttataagaatactgtgaattaaaacctattcaacaggggggaaggtcttttggtttctaaatcaacgattgatccggaagtgattgaaaaaatcatcagctcgctggaaacactcgatttcggcacggttcagattacggttcatgattctcagattacccaaattgagaaaatagaaaagcaccgtttttcgctgaaaaggaaagaatcaaaatgataatgtaaagggcgtttgttttcattaaattctccttaaaacatatacatatttcatccaatttttatataatagacctttaagatcattttttaggaggatttttgacatgcaagctacggttcacgagagtaagcaatcgatcatgcaacgcattttgacagtctttgtcttcacattgctgatcgcgactgtcggcctttttatcggccaatttgttcctgtcgctttgatgctgccgctttctattcttgaagtggcgatgattattctggccttctggatgcgcagaagaaaagcggtcgggtatgcgtttgtatatacattcgcgttcgtttccggcattaccttatttccgatcgtcagccattacgcttccatcgccggcgcctatgtcgtgctcgaagcctttggctctacatttgtcatttttgccgtcttgggcacaatcggcgcaaaaatgaagaaggatttatccttcctgtggtcgtttctgctggttgcggtgctcgcactcgcagtggtagggattttcaacattttcagcccgttaaactcagcggcgatgatggcgtattccgtgatcggaaccatcgtcttttccctttacattttgtatgatttgaaccaaatcaagcaccgccacattacggaagacttgattccggttatggcgttatcgctgtacctagactttatcaacttgttcatcaacctgctccgcttcttcggcattttgagcagtgatgattaatgaaaaagcgtctgtcattggataggcgctttttgccatacatcaaaaaggcaggtggagtattggtgaaaaaacaaatgggcgcatatgtatctctggcagcagctatggcgatcgtcggcagttctgtcgttgtcggcaagctgatggtcgaacggattccggtctttctttcctcaggattgcgttttttgatcgcttctgtcgtattgctcatgctgctgttttgcattgaaaaagggtttccggctttgacgaaaaaagatgtgttcgtattactggtgcaatcattcacaggcgtgtttttgttcagtatttgcctgctgtatggggttcaatatacgacgggaacggaaagcggcattttgacaagcacaacccccatgttgatcggtattttatcctttttcctgctgagagaaaaaattgagaaaaagacgctgatcggcattttgctggcggtttgcggcgtaatggcgattaatttgtttggagccgggagccaagacgggacgccgcacgccttattcgggaacatgctgatcattgctgcagtcattggcgaagcgttgtttacattgatggccaagctgctatccccgcatatttcggcactggcgatttcgaccttcgtatcgctcttcggcttcctgttttttctcccgtttgctttgtttgaggcctcttcatttgattacagcgtgccgactgttttggattggtcgtatgtgctgtattacgcgctttttgtcactgttttggcgttttacttatggtatagcggggtgacgaaggtgccggcgggtgtatcgggcattttcacatccgttcttccggtctcagctgtcattttgtcaggcgtgatattgaaggagccatttgagtttgtgcatttcatcggcattgcatgtgtcatcggcggcatatttgttacggtcataaagaaaaaacagccggatgcgtatccggctgcagaagaaaagacgctatagcctgtccggatcggacgggttttttagtctttaaacacgctcagcctttcaaaaagatcaccaagcatcttcacgaacatgtctttttcctcgtcgctgtagttttccatgacagcggatattttgctgaaatggccgggcagaaattgctccaggcgtgctttgccttctgttgtcagttcaatgctgatttttcgtttatcctctgtgtgatgcctgcggctgacaaaaccgtctctcgccagcccgtctagcaggcctgtaattgttgctttcgtgacatttgaccgcttggcaagctctgtcggacttaacctatgatccttggcatcaaagagcagcatcaggattttgaattttccttctgaaagccctcggccagcaaagtaatgctccatcacatgattcattttttttgaaatatcaaaaagagataaaaacaattcaagagagccggcgtcaatattggcatacgtttcggcgtgctctgttatatgcttatatttcggtaaatgttttaattccatcgcaattagctcccgtacattcgttgtgacacgattataaaggagggaaaaccataacgcaacttggcttggagatgattgacagcttttcttgggacatagtaaggtaatatagttaggcgcctaactaatacatatagagctgaaaaggtggttattgatatgaaacatatgttaatagcaggaggcggaatcggcggcttgtcagcggccatttctctccgtaaggcagggttttccgtcaccttatgtgaagcggcttcagaaaatcgaaaaacaggtgcggggattcttcagccgcaaaacgcactggcggtgttgaaagaactgggcgtattcgaagattgctgtaagcacggctttcaaacagaatggtttaaaacgtttgatgaacaggggaatttgctgtttcaagtcagtgaatcctttttagacgattcacttccgggacgcaataatatcctgcgcaaaacgttaaatgacattctcatgaagcatgccgaggcagtgggtgtagacatcaagtgggggaaaaaggttgtcgcctatgaagaaactgctgaatcggtcactgccttatgtgaagatggagaaaagatgcaggctgacattctggcgggctttgacggcattcactccgttgttcgtgataagatgctgcaaaaggaaacggaaaaagagcatctcggcatgggagcgtggcgcttttatatcgaacttcctgattacacattcgaggacgcaacattcatgtatagaagcggagacacacaaatcggggtggtgccattggcacaacacgctggctatgtcttcgtcctccagccttgcacgagcgattactgggatgaggaagatacccggtttgatagagtaaaagagattctttctggttttcgggggctggattttgtcacaaagcacatgtcaaaacagcatcctgtcatctttaacaaactggagcaggtcgccgtgcaggagccatggcataaaggccgcgtcatcatcggaggagacgccgcccacgccggtgcgccaaccctggcacaaggagcggcaatggcgatcgaggatgccatcgtcctcgccgaagaactccaaaaccacgccgaccacgaaacagcattacaggcgtactataaaagaagagccccacgagcgctcaaagtccagaacctatcatctgaaatcgtccgccgcaggctgaaaggagagccgggagcggaagaactgattggggagtgctatgcggtgttgagggaagggtattaaataggaaaagtccagaaagtgatttctggactttttagtcttgctctgttttattccttatccgctcaatcacctcatgcagcccctcaggcttataaaactccaccggtgaactgcctttctcaaacgaaatcgtctcggcttcaatcagcgcgacatagcgcccgtttacttttgcgagatgaatagaatcgccaaaatccgctagcaatcccttaatctctgtttctccgactttcattttcagctgggcctctggcgtgtgctcgatgatttgggcggaggcttcgatgacttgatgggtgtcgaggcgctcttggatttcccgtttttcgcttgcttcccaaatctcaatgtcgtgctcgaactgcttgagttcttcgctgttgtcttcaaatgtctcgtagacgtgctcttgtaccatgttcatgacctgatttttcatgatttctggcatcgattctccgtactcgacgaatttcagaaagtcctcaaaatagcgggcgtgcgaggcctggtggattttcagttcaccttcctcgaccattccttcctctggcatgtacgggtattggatgcttttcatgttttttgtcgtgatcgccatttcgacttttttaatgagagaagacgcgtcagagatgcgggcgaccttcggctcaaaatcacatttcataatgaagacaaatgactcatcaaagtattttctcggcacggccgaagcgacgagaaacacgccgccgcgaaccgcgcttgtgtcaaggtacgtgcggacgaactgctcgctcagctcattgaagtcttcttttgtttccgccagacgcgcgcggttgaacatgttgtagtttgggttggaatcgagctcgtggccgggctcgacgataaaatggccgattttcgtcggcacctgctcggactgcggatggcggtcggctttccgtttaacgatttttttcagttccccgtcgagaaagtccttcagctcgctttcttcaaattctcccgtatcaagggtctggaagtgcttgaactgcttgttcgcctgctcatctttgccttccacctgtatgacataaaaggataaaaaccgaatttcaaaatccatatataaactcaccttattcgcgtattgtacagcttctcaagtatagaaaaaacagcgatcatgcgtcaattgggagaacggaataatcatgaccatgaaagggaaatgtagtcaaatagaaggcatttcatacggaaaggaatggttcgatgaaggaaacaagcccgattcctcagccgaagacgtttgggccgctcggcaatttgcctttaattgataaagacaaaccgacgctttcgctgatcaaactggcggaagaacagggcccgatttttcaaatccatacacccgcgggcacgaccattgtagtgtccggccatgaattggtgaaagaggtttgtgatgaagaacggtttgataaaagcattgaaggcgccttggaaaaggttcgcgcattttccggtgacggattgtttacgagctggacgcatgagcctaactggagaaaagcgcacaacattctgatgccgacgttcagccagcgggccatgaaggactatcatgagaaaatggtcgatatcgctgttcagctcattcaaaaatgggcaaggctcaacccgaatgaagcagtcgatgtcccgggagatatgacccggctgacgctcgacaccattgggctatgcgggtttaactaccgctttaacagttactacagagaaacgccccacccgtttatcaacagcatggtgcgggcgcttgatgaagcgatgcatcaaatgcagcggcttgatgttcaagataagcttatggtcagaacaaagcggcaattccgctatgatattcaaacgatgttttcgttagtcgacagcattattgcagagcgcagggcgaatggagaccaggatgaaaaagatttgctcgcccgcatgctgaatgtggaagatccggaaactggtgaaaagctcgacgacgaaaatatccgctttcagatcatcacgtttttgattgccggccatgaaacaacgagcggcctgctttcctttgcgacttactttttattgaagcatcctgacaaactgaaaaaggcgtatgaagaggtcgatcgggtgctgacggatgcagcgccgacctataaacaagtgctggagcttacatacatacggatgattttaaatgaatcactgcgcttatggccgacagctccggctttcagcctttatccaaaagaagacacagtcattggcggaaaatttccgatcacgacgaatgacagaatttctgtgctgattccgcagcttcatcgtgatcgagacgcttggggaaaggacgcagaagaattccggccggaacggtttgagcatcaggaccaagtgcctcatcatgcgtacaaaccattcggaaatggacaacgggcctgtatcggcatgcagtttgcccttcatgaagccacacttgtgttaggcatgattctaaaatatttcacattgattgatcatgagaattatgagcttgatatcaaacaaaccttaacacttaagccgggcgattttcacatcagtgttcaaagccgtcatcaggaagccattcatgcagacgtccaggcagctgaaaaagccgcgcctgatgagcaaaaggagaaaacggaagcaaagggtgcatcggtcatcggtcttaacaaccgcccgcttctcgtgctgtacggctcagataccggcaccgcagaaggcgtcgcccgggagcttgctgatactgccagtcttcacggcgtaaggacaaagacagcacctctgaacgaccggattggaaagctgccgaaagagggagcggttgtcattgtgacctcgtcttataatggaaagccgccaagcaatgccggacaattcgtgcagtggcttcaagaaatcaaaccgggtgagcttgagggcgtccattacgcggtatttggctgcggcgaccacaactgggcgagcacgtatcaatacgtgccgagattcattgatgagcagcttgcggagaaaggcgcgactcggttttctgcgcgcggggaaggggatgtgagcggtgattttgaagggcagcttgacgagtggaaaaaaagcatgtgggcggatgccatcaaagcattcggacttgagcttaatgaaaacgctgataaggaacgaagcacgctgagccttcagtttgtcagagggctgggcgagtctccgctcgctagatcgtacgaagcctctcacgcatccattgccgaaaatcgtgaactccagtccgcagacagcgatcgaagcactcgccatatcgaaattgcattgccgccggatgttgaatatcaagagggcgaccatcttggcgtattgccaaaaaacagccaaaccaatgtcagccggattcttcacagattcggtctgaagggaaccgaccaagtgacattgtcggcaagcggccgcagtgcggggcatctgccattgggccgtcctgtcagcctgcatgatcttctcagctacagcgtcgaggtgcaggaagcagccacaagagcgcaaatacgtgaactggcgtcatttacagtgtgtccgccgcataggcgcgaattagaagaactgtcagcagagggtgtttatcaggagcaaatattgaaaaaacgaatttccatgctggatctgcttgaaaagtatgaagcgtgtgacatgccgtttgaacgatttttagagcttttacggccgttaaaaccgagatactattcgatttcaagctctccaagagtgaatccgcggcaagcatcgatcacagtcggtgtcgtgcgcggcccggcgtggagcggccgtggcgaatacaggggtgtggcatcaaatgatttagctgagcgtcaagccggtgatgatgtcgtgatgtttatccgcacaccggaatcccggtttcagcttccgaaagaccctgaaacgccaattattatggtcgggccaggcacgggagtcgcgccatttcgcggtttccttcaagcccgcgatgttttaaagcgggagggcaaaacgctcggtgaggctcatctctattttggatgcaggaacgatcgggattttatttaccgagatgagcttgagcggtttgaaaaagacggaatcgtcactgtccacacagccttttcccgaaaagagggcatgccgaaaacatatgtccagcatctcatggctgaccaagcagatacattaatatcaatccttgaccgcggtggcaggctttatgtatgcggtgatggcagcaaaatggccccggatgtggaggcggcacttcaaaaagcgtatcaggctgtccatggaaccggggaacaagaagcgcaaaactggctgagacatctgcaggataccggtatgtacgctaaggatgtctgggcagggatatagataaagaagactggagacatccagtctttttagtcctttcgaaaaaatggtgatcgcgctaaacattgatgcatacaataacttcagtccgccggaagggcgggctgtctgcaaaacctatttttcgtttttgctagtttatgttattcttatactcggtatctatttcttttttcaaaggcacacatgacaaaagaaatcctttttttatttccgagaaaaaaatgtgaaacgaaatgaaggtttctttcgtccagtgattggtttccaaatggttgtaataaaaatgatatggtgcgaaacataaatattccggcttgccgcggtgtatttattgttgtgtgatgccttgattttgtttggaaagaaggaattggaaggcaggatataaagagcaggtaaatatgaatgaagaacttaaagtgtttaagaaagtagaggttgccatgaagaaacttttttcttacaaacttagcttttttgtgctggctgttatactgttttgggcaaaaacgtatttatcctacaagactgagtttaatcttggggtaaaaggcacaactcaggagatcctcctgatatttaacccattctcaagcgccgtcttctttttaggactggctttgctggcgaaagggcgtaaatcagccattattatgctgattatcgatttcttgatgacatttgtgttatatgcaaatattttattctatcgtttctttgacgatttcttgacgttcccgaacattaaacagtccggaaacgttggaaacatgggagacgggattttcagtatcatggccggtcatgatattttctatttcttagatattatcattttgattgcggtattgatctggagacctgaattaaaagaatacaaaatgaaaaaacgctttgcatctttagtgatcctttctgggatcgcactgtttttcatcaacctgcactatgcggaaaaagaccgtccgcaactgctgacaagaacgtttgaccgcaattatattgtgaaatatttaggtttatacaactacaccatttatgacggtgtacagacggctcaaacagagacgcaaagagcctatgcaagcagcgatgatttaacaagtgtcgagaattacacgacgtctcattatgcgaaaccaaacgccgagtacttcggctctgccaaaggcaaaaatatcattaaaattcacctcgaaagcttccagtcattcctgattgactacaagctaaacggtgaagaggtgacgcctttcttaaataaacttgcgcacggcggggaagatgtgacgtattttgataacttcttccatcagacaggccagggaaaaacatctgatgccgagctgacaatggataactcgatcttcggtcttcctgaaggctccgcgtttgtgacgaaaggcgaaaacacctaccagtcgcttcctgcgattttagaccagaaggaaggctatacaagcgccgtcctgcatggtgattacaaatcgttctggaaccgtgaccagatttacaaacatatcggatatgacaagttcttcgacgcaagcacgtatgatatgtcagatgaaaatgtgattaatatggggcttaaggataagccgttctttacagaatcgattccaaagcttgaatctcttaaacagccattttatgcgcatttgattacattgacaaaccattatccgtttaaccttgatgaaaaagacgcgtctcttaaaaaagcgacaacaggcgataacacagttgacagctacttccagacagcgcgttaccttgacgaagcgcttgagcaattcttcaaggagctgaaggaagccggcctgtatgacaactcagtcatcatgatttacggtgaccataacggtatttctgaaaaccataaccgagcgatgaaagagattcttggaaaagagatcacagattatcaaaacgcacagaaccagcgtgtgccgctgatgatccgcgttcctggcaaaaaaggcggagtgaaccatacgtatggcggcgaaattgacgtcatgccgacacttctgcacttagaaggaattgattctcagaaatatatcaactttggtactgatttattctctaaagaccacgacgatacggtggcattcagaaacggagacttcgtaacgccgaagtacacatcagtcgacaatatcatttacgatacgaagacaggtgaaaaactgaaagcgaatgaagaaacgaagaatctgaaaacaagagtgaaccagcagctgagcctttcagacagtgtcctgtacaaagacttgctgaggttccataaactaaatgatttcaaagccgttgatccgtcagactatcattacggcaaggagaaagaaatcaaataagatgaaaaagagccttgagcgggcgcattgccttcgctcaaggctctttttttggttatacaaccaacttgaaaaaatagattccatttggtcaccaaggctggctttctctcatatcattacagtagattttgaaaccggattgaaatcggacaaattatcggggaaatgccttgatagattgtgaagatgtaccaggtttcgaactcaatattcatagagatgaggggtagagatgaaagcggtcattctctgcggcggaaaaggaacgagaatgagtgaagtcacgaatgacattcctaaaccgctcgccatgataggcggcaaaccgattctatggcatattatgaaaatttatcagtactacggagtaaacgagtttattctgcttttgggctataaaggagaaaaaatcaaggaatactttctcgactatgaatggaagcacaacagcctgacactcgacagctctacgggagaggtacagatgctggggcagcctgaaacgtggaaaattacgtttttggagactggggtagatacgctgacagccggaagaatcttgcaggcgaaagactatatcggtgatgaaacatttctgctcacctatggagacgggctggccaatatcaatcttttccatctcatcagctatcatcagacaaaaggtgctgccgcgactgtcaccggcattgacaaagtctcgcagtttggcaccttgacagttgaggatggcatggcgaaaacattttctgagaagacatcaagtgatggaatcatcaacggcggattcttcgttcttagtccaaaggttttcgattatttgccgaaggacgggaacacgatgttcgaagatgaaccgctgaagaaccttgccaaagatggggagcttgctgtgtaccgccattacggattttggacggccatcgatacgtataaaaatctcttagaagtcaacaaaatgtggaatcaaggacaacaagtatggaaggtatggtgaattgatttgagtttctggaaaaataaaaacgtatttgtcacgggatgcacaggtcttttaggaagctatttggtgaaagagctgatcgaacagggcgcaaacgttacggggctagtcagggatcatgtgcctcaatccaatctttatcagggagaacatatcaagaaaatgaacatcgtgcggggctctcttgaggacttggctgtgattgaacgcgcgcttggcgagtatgagatcgacacagtctttcatcttgctgcacaagcgattgtcggcgtggcaaaccgcaacccgatttctacctttgaagcgaatatcctcggcacctggaatattctcgaagcctgccgcaagcatccgttaattaagcgggtcattgtcgcttcaagtgataaagcttacggcgatcaagaaaaccttccatacgatgaaaacatgccgctgcaaggcaagcacccgtacgacgtctcaaaaagctgcgcagatctgatcagccacacctattttcacacgtacgggcttccggtctgcattacgcgctgcggaaacttatacggcggcggagatttgaacttcaaccgcatcattcctcagacgattcagcttgtgctgaacggggaagcgccggaaatccgaagcgacggcacatttgtacgggactacttctatattgaagacgccgttcaggcttatctgcttcttgcagaaaaaatggaagaaaacaatcttgccggagaggcctttaacttcagcaatgagatccagctgaccgtacttgaactggtagagaaaatattaaagaaaatgaacagtaatctgaaacctaaggtgctgaatcagggaagcaatgaaatcaaacatcaatatttatccgcggaaaaagcaagaaagctgctgaattggacaccggcctacactattgatgagggacttgaaaaaacgattgagtggtatacggaattcttcaaaaagtaatgtgaaacgaggtgaacaagactgtgaccagcgcgtattgcaccgttttatcaaaaggaagattatatcaggcagtcgctttgtttaagtcgttagagcaagttgatcaagacagtcccatttttatactttgcatggatgaagatacgcaccgcgtgttacagaagctgaagatgaagcagctgaaccttgtgccggtggccgctcttgaaaatgaattgctgctgaagctgaaggaaactagagatcaaagtgagtattgctggacgatgaagccgatctttctgcaagctgtgctgaacagcaatcctgagctggagcgtgtgacgtatattgacggggatctctttttctatgcagatccatcgccgatttttgaaaaccagccggactgctcggtgttgctttcacgaggggatattgtaatcccttcttttgagaaagagcagattgacatgctgcagcgtcttttaggcagatataattccgggtttatcagcttcaagcatgatgatgcaggcacggattgcttggagtggtggaaggaacgctgtcttgaggaatgcaaaaatgcaccgggtgaagggaaattcggtgatcagggctatttggattatatgtctgagctgtttccgaatgtgtgtgacattacaacacccggcgtgaacatcggccattggaattatggacagcatacgttttcctggaaagatggccggatcgtgctggaggatggcagtccgctgatcttttatcatttcagcggataccgaatcgtcagcatcaatgaaatcaaacagattcatgaaacaacccgcacagatctgccgtttgtgcatgaactgtatcaagagacactgccgcatatcattcagcacatgcaaacgttagaccctgaatttaacggttttgcttcaaaagatgacaacaaataaatgagtaaatacaggaagtgaaaatgaagtgaaagcaagcgttattattcctgcatataattcgaaggagcgtctttacaacagccttctgtcattaaaccagcaggagtgcgatgaagaatttgaagtcattgtagcggacaatggctctgaggacgggacgctctcgatgcttgagtcatttcaagctgattttccgctgatctttacacggattaaagaaaacaggggcattgcgtacggacgaaatcaggcgcttcgcaatgccagaggagacatcctgattttccatgacagcgatatgcttgcggcaaaggaccttgtggcaaaacatattaaagcccatgagaacgaagagaatctcgtcgtgtgcgggttgttttggaaacggatctacagtttttactatgaacgatttgaagaagaacataaggaacagctcgcaaagctcacaggtgaaatgccgaagaaagacaaacaaaagctgctggaggaagcggacatcaaaaacggaagctttcttgataaaagctttgacctcgataccgactttatagacgtgctcaagaagattttagatgagtacggcgatgacttgaaaggctatcatatgccatggcgcttttttatcacgaataattcctctgtgaaacgcaagcatgtggttgacctcggtttatttgacgaaggcattgtgcggtacgggtttgaggattatgacctcgggatcaggcttcatcaggccggattgaccttcaggcttcgccgtgatattgtcagtgttcatcaggaacatccaagcaattgtaagtctgtagacgatattcgggcaaacattgcctatatgtgcgataaatacaataacatccgctccttagacgttcatctcgcttttaatgggccgttcccgcctgacatgacgaacagaatcatggctgatattcaaaagctgctggaatcacagaaatatgatatgctgctgaatctgtttcttgagcttctgcatgttgttaaagagcgcaacattgatccggattggcgaaagaaatccccaagggtgacggcgaaaagctttgatttgcaaactgtccgcaagcttctgcctaaggcgaagaaaaagctaggcgtgaacgattttgccaacgcactgtatgcgcttgtcaacgatttgctgcacgtggatcttagatcattggatgtggtataagtgagtacatttcatttttcaacgatagtgtcaaggacacatatctttaagctcatgcctatgattcattctctccatgagcattgcgatgattttcatttatatgtgctgtgtgtcgaccagaaagcgtatgaattgcttcagcacgttccatgggagcatgtaacctttgtgcagctgcatgaaatggaagacccggagctgttgaaagcgaaaagcaacagaacgtttcatgaatattgctggacgttaaagcccgcctttttgtttcatgtgatgagcaagtgggatgacgctgaatactttgcccatatggatacggatctatttttcttttctgatccggcacgtatttttgcagaaaacccaacggcgtctctgtatttgactgatcatcgtaattcgccgcgcttcatgtcctactacgaccgaaccggacgctttaatacaggctttgtcggcgccggtaatacaaaggaagcatatgaagcggtgtggcagtggagacaggactgtattgaattttgcacggtcgaaatggatacggaacgaaagacatatggtgatcaaagatatgtggagaaatggccggagcagtttaaaggtgttcatgttgtcaaatccataggagccaatacagcgctttggaatatcgaaaactataaggtcgggcaaaaggacggccgcgtgtatatagatgaaacgccgctgattttctatcatttctctgggtttacgctggtgacagaaaaagagtttaatctttgctggtactaccggattgaagacgaagcgacaattaagatgatttatatgccctatatattaaatctgaaaagatggattgatgaaatacagtcggcgtttccggactttgcggatggctttatcccgaagcacgcagtgcctgacactcattttatccagctggattaaaaaaccccctgccgcctggcaggggttttttcagctatgccattctctcagcttctggtcacttggcaataggaaggcaaggatgccgaggacagggagaaaggcaatggcgatcatcgtcggggtcagtcccgcggcatcaatcagagcgcccagcgccacagcgccgattgcgcccatcccgaaggcaagcccgacggttaaaccggacattgtgccgatttttccaggaactagctcctgtgcgtagacgaccgttacagaaaagctcgacatcagaaccaagccaatcaatgcgagcacgccgtaggcgagaaccgggccggcaaatggcagcacaatcgccagcggcgccgagcataacagcgaaccgaggataacgaagcgttttccaaaacggtctgcaagcgggccgccgagaaacgtgccgatcgcgccgaacagcaagaagacaaaaatatagctttgtgcctgctgaatgcttacgtgataggtatccatcgcgtaaaacgtgtaaaagttaccgatcgcactcgtataccaagaacgagcaaaaatgagaaatataataataataagagcagatacaacagatttggtgatggccgtgttttcagccgttttcttttgcttgcctgatttctgggcaaggctgccgagacgtgaggcgtaccatttcgcaatatacatgagaaacataacagcaagcgcggcgacaagcgtgaaccaaacagcgccgaattgcccgagcggcacaaggatcagcgcggtgatcagcggtgccatcgcctggcctgagtttccgcccacctgataaatcgattgggcgagcccgcgttttgtgccggcggccatatacgccacacgggagccctccggatggaaaatggccgagcctaatccaatgaaaaacacacagcataagatcgttatgaatgacggggcaaatgcaaggcccaaaatgccaagcatgctggcggtcaaaccgactggcagcgcatacggccgcggccgtttatcggtataccagccgacaacaggctgcatgacggatgacaccatgtttaatgtgaaagcaatgatgccgagctgtgtaaacgtcaggctcatggagcgttccaaaatagggaacatggccggaatcacagcctgaagcgaatcgttgagcatatggcaaattccgataataatcaaaatcggatacaccgtggtgcctggtttttgaactgttttttcttttaacggggcggcgatagccattgagtctcctccttacatatataaccaaagcataccaccatattattcataaggtgaagaatttatcaagaggaaaaaagattcttatgaaagaaataccgtcagcctgattagcagctgacggtattttcgatattcaaaatgtgatatagctcttcaagcttacgaatctcataggttggtatgatctctggcacattcggcttcatgtcagggttcatccagcaagtatcaagcccggcgagctgtccgcctttgatatcagcagttagtgaatccccgatgattaatgtgtgctctgctgaaaattgaggaatccgttcaaacacgtaattgaaatattccttcatcggcttttggaagccggtgtcttcagaaacgaaaatgtccttgaagaatggaaataatcctgaatcacggagacgcttatattgtgtgtgagacacgccgtttgtcacgatgtacaaatcaaactgttgctgcagatttgagatgagatcaaatgcaccgtcaataagctgatgtccttcttcaagaaagcggcggtatttttgctcaagcaaagcgccgtccgcttcgtaaccgtactccttgagcaaagcggaaaaacgtgtgtttacgacttcatcccgtgtcatcttaccttcttcaaaggctctccagagaccttgattgatggttttatactgcgccttcatgtcatttgttaaaggaatgttctgatcttcaaacagcaaacgcagggctaaagcttctgccgcttgaaaatcaaggatggtatcatctacatcaaataataaagtgcggtatcgcttcatctgtgtgtctccctttctcatatgtattcaaagtatagcacataaaaaaaggaaaaagccggcgggtgaggcaccgccggctgaaaagagattatttgtttaataagctgtgttttctcgaatataggaagtaaaccagcgttccgacagcgatccagatgacaaatgaaagccatgtgacgccgggaaggctgtacatgaaccaaaggcagatgcctgcgctgataatcggcacaaccggaacgaatggcactctgaaggacgctttgatttcaggatgtttctttcttaacacaatgacagcaatggaaatgaccgtaaacgcggcaagtgttcccatgttcaccagatgggccagcgttccgaggttaataaagccggcgattcccgctgcaacgatccctgtcagccatgtgttgcggaacggggttttaaatgacggatgaacctttgcgaacaatccaggcagaaggccgtctctgctcatggcaaatgtcaagcggacctgtgcgtacagcaaagcgagcatcaccgtcgtaatcccgataatcgcaccgacagaaataattccggcaacagcgtcctgtccgacgaatttcagcgcaaaggatacaggatctccgacattcaatttggcataaggcatcatgcctgtcagcacaagcgataccgcgatgtacagaaccgtacagacggctagagctgaaataatgccgacgggcatgtttttttgcggatttttcacttcctctgatgcgttagaaaccgcgtcaaacccaaggtacgcgaagaatacagtggcagcgctaagtatgacgcctttcatcccgaatggcataaaaggagaccagttatccggtttcacatagccgatgccgacaataatgaacaataatatgatcgcgattttcatcagtacgatgacgttgttaaagcgtgtgctttccttgacgcctctgctgacaatcgcagtgatgaggagaatgatcaccgcagccggaaggttaaatacggcgcccgccatgcttcccggcgctcctgtcagtgcagccggaatatgaagattgaagccggcaagcagtgattgaaagtatgaagaccagccggtggcaaccgccgacagtgcaatgacatattcaagcatgagatcccatccgatcaaaaaggcgagcagctctccaagtgtcacgtatgagtatgagtacacgcttcccgaaatcggaatggaagacgaaaactcagcataacagaaagcagccagcgcacaggcgagccccgctaaaataaacgatatgatgagggcgggacctgcaccggtcgctgccactgttcctgtaatgacaaaaatccctgtaccgatgacacaaccgataccgagcaaggttaaatcaaatgcgcttaacgtacgggcaaggctttttgacttgctctgcgcactcaatgtttcaagcggtttttttctaaataatgaactcatcaaaagttcctcctagaaatattcaaaatattctaatcattatatgcagttcttgttgtattatattgtcgaaatttgacgtagtcaataaaatatttttctgctttaaatgatagaagcgaaacagcgttgtcgtatcataggatagtaatttttactaatcgtatattcaattttatgcaagatgaaccgatagaaaaaatagattcgcccatattttgatttgcggttataaaggagatgctgaccatgtttcaatatgaagagttgaataaacagtttatcggcgggaaatggcaggagggcagcagcccaaatgtattggaaaacaaaaatccttatactcaaaaaacattcacaacattccgtaaagcgactgctgacgatgtagatgaagcgtatcgggcagcggcgctggcaaagaaaaaatgggatgcggtcaacccgttcgagaaaagaaccattttagaaaaagccgtcacgtatattgaagaaaatgaagaagccattatttatttgattatggaggagctaggcggtacaaggctcaaagcagcttttgaaatcggtcttgtcaaaaacatcataaaagaagcggcaacgttcccaatccgcatggaggggaaaattcttccgtcaacaatagatggcaaggaaaacagattatatcgcgtgccggcaggcgttgtcggtgtcatcagtccgtttaacttcccattctttttatctatgaaatcagtggcgcctgcactcggagccggcaatggcgttgtgctaaagccgcatgaggaaacgccgatttgcggcggaacgctgattgcgaaaatttttgagaacgcgggaattccagcggggctgctgaatgttgttgtcacagacattgctgaaatcggcgacagcttcgttgagcatccagtgccgcggatcatctcatttaccggttctacgaaagtcggcagctacatcggacagcttgcgatgaagcattttaaaaagccgcttcttgagcttggcgggaacagcgccttcatcgtacttgaggatgcagatatagaatatgcggtcaatgcggcggtgttcagccgatttacacatcaagggcagatttgcatgtcagccaaccgcgtgcttgttcattcttctatttatgacaagttccttgagctgtaccaggcaaaagtggaatcgctgaaagtcggcgacccaatggaccctgatacgattatcgggccattaatcaacagcagacagacggacgggctgatgaagactgtagagcaagcaattgaagaaggcgctgtaccagtgaagcttggcggatttaacgggacgatcgtggaaccgacgatcttaaaagacgtcaaaccgttcatgagcattgccaaggaagagctgttcggaccagtcgtctcctttatgaagtttgattcagaagacgaagcggtggatatcgcaaacgaaaccccgtttggcttgagcggtgccgtacatacgtcaaatcttgagcgcggcgtggcttttgcgaaacgcattgaaacaggcatgattcacgtcaatgacacgaccatcaatgatgaaccgaatgtagccttcggcggtgaaaagcaatcaggcctcggccgtttaaacggtgagtggagcctcgaagaatttacaacgctgaaatggatctcggtccagcacgaaaaacgcagcttcccttattaatgaaaaggagtgaatggaattgaccataaatacggaaaaagaaaccgcagatattctggacgcatttatcaaagtagccccttatttaaacagcctggttcaggatgatattacaatcggcatttatgatacggaaaaactgctcgtgaatataccggccaaaaccttttcgctgaacgtaaaagccggcgatccgctgcaggaaggggatatcatcacagatgccatccgcagcaatcagaagaagacgagcatggttccgaaagaattgttcggcttcccattgatcgcgcgtgccatcccgctgcacgacgagaatggaagagtcattggaggcgtcggcctcggaacgagccttgaggagtcgtcaaagctgcatgatgtcgcggaaagcttatcagctgttgttgaacaaacagccgcggctatttccgacatttctgaatcaattaacgggttttcaactcaaatgtcgggcatttcctctcaggcgaaaaaagtaagcgaaagcgccggtgaaatcgccgatatttcagtaactgttaaaggcatctcggaccaaagcaatctgctcggcttgaacgccgcgatcgaagcggcaagagcaggggagtccggaaaaggattctctgtcgtcgcagatgagatcagaaagctagcgacgcattcaaaagaaaatgtcggccaaattgaccagattacgaaaaaaatccacagcctgctgaaagggctggaggaatccattgagtcgattaaccagcatacagacggacaagccgctgctgttgaacaaatttccgccacgatgcaggagatttcaggaagcgcgcagcatcttgcgaaaatggccgaaaaagcgcttgaggaagagtaagagaccggggacaaacatccccggtctttttcttatcctgcatttccatgaaattcgtctgacgttttactagttttattccagcggctgatttaaaatgtacacatgaacttacgtgaggattgataggaaccatgagcatattaaaagcggaaaatctttataaaacatacggagataaaacattatttgaccatatctcctttcatattgaagagaatgagagaatcggattaatcgggccgaacggaacaggaaaatcaacgctgttgaaagtgattgccggcttggaatctatcgaagaaggagaaatcacgaaatccggaagcgtgcaggtcgaatttcttcatcaagacccggagctgcctgcggggcaaacagtgctggagcatatctattccggtgaatcggctgtgatgaaaaccttgcgtgaatatgaaaaagcgctgtatgaactggggaaagatcccgaaaatgaacagcgccagaaacacctgctggcagcacaagcgaaaatggacgcgaacaatgcatgggatgcaaacaccttggcaaaaaccgtattgtctaagctgggcgtcaacgacgtaacaaaaccggtcaatgagctctcaggcggccagaaaaaacgggtggccattgccaaaaacttaattcagcccgctgatttgctcattttggacgagccgacaaaccatttggataatgaaacgattgagtggcttgaagggtatttaagccaatatcccggcgccgtcatgctggtgacgcacgatagatatttcttaaaccgtgtcaccaaccgcatttatgagcttgaaagaggcagcctctacacttacaaaggcaactatgaagtgtttttagaaaaacgcgcggaacgggaagcgcaggctgagcaaaaggaaacgaagcggcaaaacctgctgcgccgcgaactggcttggctcagacgaggagcgaaagcccgctccacaaaacaaaaagcgagaattgaccgggtagagacgcttaaagagcagacaggccctcagtcatcaggttcactcgattttgccattggctcgcaccgtctcggaaaacaggttattgaagcggagaacgtcatgatcgcttatgacggccgcatgctcgtcgaccgttttaatgaacttgtcataccaggtgaacggatcgggatcatcgggccgaacggcatcgggaaaacaacgctgttaaatgcccttgccggccgtcatacgccggacggaggcgatattacgatcggacagacggtcagaatcggctactatactcaggatcatagtgaaatgaacggtgagttaaaagtcattgactatataaaagaaacggcggaggtcgtaaaaacggcagatggcgatatgattacagctgaacaaatgctcgagcgtttcctcttcccgcgttcgatgcagcagacgtatatccgcaagctgtccggcggggaaaaacgccgtttatacttgcttcaggttctcatgcaggagccgaatgtcctgtttctcgatgagccgacgaacgatttggatactgaaacattaagcgttcttgaggattatattgaccagttcccaggcgtcgtcatcaccgtatcccatgaccgctatttccttgaccgcgtcgtcgaccgtttgattgtatttgaaggaaatggtgtcatttcccgctttcaaggctcctatagcgactatatggaggagtcaaaagcgaaaaaagcggccccaaaaccggcagctgaggaaaaaacggctgaagccgagccgaagaaaaaacggaaaaagctttcttacaaagaccagttggaatgggacggcatcgaagataaaattgcccagctggaagaaaagcatgaacagcttgaagctgacatcgccgcagcaggcagtgattttggcaaaatccaagagctgatggccgagcaggcgaaaacggcggaagagcttgaggctgcgatggaccgctggacagaattgtccctcatgatcgaagaactggaaagctaaaaagcgtggccgcagcaggccgcgctttttttcacataatggacaaaaacgaaccggcctgcttatgttaggataaagttgtgtgtcagcggcacatggaaaactaacggagatgatgaagtatgacatgggcgatcgtgatgttaattctcatgagtctggtgaaaatcgtattaacctgtcttcctacaggcgtcatagaatggctgctcggcaaatttgaagtgcacgccaagctgagtgacgaaaatgcgagtctctctctagatggaaaacgcctcgagggtgcagagaagcagaaagtgattgatcaatttaacgaagctatcttcctggaaaaatattatatctatccaggtgatgaagagcgttatttacatccggaaaacggcggcacgcctctggtgatagatacaaaaaaaggaaaaaaagacgtgaagctgttcgtgtaccgctacgacgaccatatcgacgtcgtgaaacagtacaagaagaaagtgatcgcgtatcgagtgctttctgaaagccttcaaaaagagtctctgtcagtggcgggaagtttagcttaaacaggaaagtgaaagacgggtgctgtatgctgctcgtcttttttattgttttttaaaacttaacgtttacgttaaggttcaaaaggtgtataatggtaacagaaacggcgaagggggatttaccttggaatggatgaagattgatcaagtggccaaaagaagcgggctgacaaagcggaccatccggttttatgaagaaatcggcttgattccggcgccgaaacggacagacggcggtgtaaggctttattcagaggatgatatggaggagcttgagaaagtcatcagcacaaaagaggtgctcggtttttcccttcaggagcttcagcatttcatggaaaccagccgccagctagagttaaacaaagaggggtatttgttgtcactggatcctaaggaacggaaagaaaaactggaggaaattcaggaaaccctgaatcaccagctggatttgattgatgagaaaatccgcacattccaaagctttaaagaacgcctgcagggcatgaaaggcaaagcggaacgcgccattcaatcaatcgaatgaaaagtttgttaaacgctatttttgtagcgtttcttttaatggaataaagatggaggttaggtcaaatggataagacaacacaagtgaatcagaaaacgggtttgctcagccagccaaaagcggtatgggctgtcgcgtttgcctgtgtgatttcttttatgggaatcgggctggtcgatccaattcttccggccattgccgcacaattgcatgcttcacctagtgaagtatcactcttgtttacaagttatttgcttgtaaccggatttatgatgtttttctcaggagccatttccagccgcatcggcgcgaaatggacattaattctcggacttatttttattattgtgtttgcggggcttggcggcagctcaagctcaatcgctcagttagtcggctatcgcggcggctggggattagggaatgctttgtttatttcaacagcgcttgcggtcatcgttggcgtgtcagtcggcggcagcgcccaagcgattattttgtatgaggccgcgctcggtctcgggatttctgtcgggccgcttgcaggcggagagctcggaagcatttcatggcgcgcaccgttttttggagtatctgtcctgatgtttattgcgttaatcgcgatttctttcatgcttccgaagctgccgaaaccggcgaaacgcgtcggtgtgtttgatgcgatgaaggcactcaaatataaaggcctgctgacaatggcggtatcggcattcctatacaactttggattttttattttgctagcttattctccgttcgtactggatttagatgaacacggtcttggatatgtcttcttcggctggggccttctgctggcgattacgtcagtctttacggcgccgctcgtgcacaaagcgctgggcacagtgcgttcgctagtcgttctctttatcgcctttgcggccattctcgttattatggggatctggacagaccatcagactttgattattacatgtatcgttgtcgctggtgctgtcctcggtatggtgaatacgatcatgacaaccgctgtgatgggttctgcgccggttgaacgttcaatcgcgtcttcagcctacagctcagtccgcttcatcggcggcgcgctcgccccgtggattgcaggaatgctgtcagaacactttactgcaagcacaccatatacagtaggcggaatcgtcgtttttgtcggcatgcttgtccttctcatgggacgtaaacatcttgctggaattaaggcggggcattaataacgaaagacactgcgcatatgcagtgtctttttattcgttataatgcatcataatcgaattggtgcaggaaaggacaacctttatgacacaattttactattttccggctgaaaactccctttagaaaccggttttttcggtcagcaagaacggcgttcgcggaaagggcatccgcttcggtcaggcattgatgcggctgggatttatcttgcagaagctgagaatgtgtccgttcatttacgattgccatttcagtgatggttcatgctgtagaggggacgtttgccatggataaggcaaaacctgacgaatatgatcagaaatgtttagaaacgctctatcaatacatacacagcgtcatgaaaaacagcttttctcggtcgagtggtttaccgcttgggaagatgaggaggattttgagctgtctgccaaaagagagctgacacttgatgaattcacatctccattgcagctcattttaaaagacagagagcttttgagaatcgttcagaaaaaatggcagtaaaaaacccgccctttagcaggcgggtttttttataaattaaagcactttcgtcgtccaagactcgcagttccacgtttctgtcgcaatatccatataaaagtctggctcgtgggaaatgagcagaatggagcctttatattctttcagggcgcgcttgagctcttccttggcatcggcatccaagtggtttgtcggctcatcgagcaccagcaggtttgtttctgagttgattagcttgcacaatctgactttcgctttttcgcctccgcttaatacggagacgcggctttcgatatgctttgtcgtcagcccgcattttgccagagcggcacggatttcatactgcgtataagaagggaattcgctccatacttcttcgatgcacgtattgttgtttgtttccttgacctcttgctcgaaatagccggtatagatgtgctcaccgcgttcaacagagccttcgagcggctggatttcaccaagcaaacttttcagcaatgtcgtttttccgatcccattcgcgccgtaaagggcgattttttggccgcgctccatgcggaggttgagcggacgggacagcggggaatcgtaaccgatcacgagatccttcgtttcaaaaatcagcttgcctgacgttctcgccggcttaaagtggaattccggctttggcttttctgccgcaagctcgatcatatccatcttatcgagtttcttttggcgggacatcgccatgtttctcgtgctgacacgcgctttgttgcgggcgacgaaatccttcagctccgcgacttcctgctgctgctttttgtaggccgcttcaagctgctgttttttcacctcgtagacttccataaactgatggtagtcgccgacataacgtgtcagctcttgattttcaacgtgataaatcaggttgatgacactattcaagaacggaatatcgtgggaaatcaggatgaacgcgttctcgtattcctgcaggtagcgtttcagccattcaatatgctgttcatcaagatagttggtcggctcatcgagaagcagaatttccggcttttcaaggagaagcttagcgagaaggacctttgtgcgctgtccgccgctcaaatcggtgacatctcgctctaaaccgatatcgctcaaaccgagaccgcgggcgatttcttccaccttggaatcaatgacataaaaatcattgtttgtcagcgcgtcttgaatgacgccgacttcttcaagcagcttctcgagctcgtcgggatcagcctcgcccattttgttgtaaatctcgttcatttcctcttccatcgcaaataaataatggaatgcgtctttcaggacgtcgcgaatggattttcctttttccagcacggtatgctgatcaaggtatccgacacggacattttttgaccattcgacttttccctcatcaggttcaagctttccggtaataatattcatgaaggttgattttccttcaccgtttgcgccgatcaagccgacgtgctcgccttttaacaggcggaaggaaacgttattaaaaatggcccggtccccgaaaccgtggcttaaatcctttacagataaaatactcatgtttacacctctatcgttatcaaacacgcacaatcggcgtgtaatattcacccttttgattataaaggaggattcggaatgttgaaaggtataggaaagaaaaagaaaaattgcgttccgggcgaggttttgagatactatggaatagatttcaggaattgaggagaacaaaatgacgcaaacttggccatttttacataatgcacaatcatttatacaagagaattggaatgcttccggctttcaaaagccaacccctgttcaggagcaggcagcccagctgatcatggacggaaaggatgtcattgcagaatcgccgacaggcacagggaagacgctggcgtatgcgctgccggtcttggagcggatcaaaccagagcaaaagcatccgcaggcggtgattttagcgccttcccgtgagctggtcatgcagatttttcaggtgattcaggattggaaagcgggctcagagctgcgcgcggcttccttaatcggcggggcgaatgtgaagaaacaggtcgaaaagctgaagaaacatccgcatatcatcgtcggcacgccaggcagggtgtttgaactgattaaagcgaagaaactcaaaatgcatgaagtgaaaacgatcgtgcttgatgaaacggatcagctcgtcctgccggagcatcgcgaaacgatgaagcaaatcattaaaacaacattaagagaccgccagcttctatgtttttctgccacgctcaaaaaggaaacagaggacgtgctccgcgaattggcgcaagagcctgaggtgttgaaggtgcagcgaagcaaggcggaggcagggaaagtgaagcatcaatacctgatttgcgaccagcgcgacaaagtgaagctgctgcaaaagctgtcaaggcttgaaggcatgcaggcactcgtatttgtgagagacattggcaacctgagtgtatatgcggaaaaactggcatatcaccacgttgaactcggcgttttgcacagtgaagcgaaaaaaatggagcgagcgaaaatcattgccacattcgaagacggagagtttcctcttttattggcgactgacattgccgcacgcggtttagatattgaaaacctgccatacgtgattcatgctgatattccagatgaagatggctatgtccacagatcaggacgaacaggccgggccggaaaagaaggcaacgtgctgagccttgtgacaaaattggaggaatctaagctgaaaaaaatggcgaagaagcttggtgttgagctgagtgaagctgtgtatgcaggcggaaaactgaagacgaaataaaaagaagggcgaagagccctttttttgttgtaaaataatagaaaagattttgcgcggaggtgggaaaatggcttcaatagacaggtttcaagtaatgcaggagccagagctgaaaatccttgaacactggtttgagaatgaggataccagacggagaatggatgggatgctgctattagatgagtggtatgcacgagtaaataaagataaacacgatactgtcatcatggcgtatgatggacagctgccggcagggatggtcgttattgagttcggagaggagcggacatatattggattgatcgtcaatcctttgtaccggcttaaagggtatggaaaacagatactgcaaaagctgatgaccgaacctgattttactagcgtgcgagaatgggtggcatgcattgaagaagacaatcgaatcagtttagcttgctttcaagcagcaggattcactttagaagacacggaacctgatgaagatggttttcttacgctgattcttcgcaactgatctcatcgaaacacaaaaggagggcaaaaagccctcccgttttcatcttcattcagctcggatcactgaccttgatcagctgtttccctttattttctcccttaaataaaccgagaaacgcgtcaggaatgttttcgaagccttctgtgatggtttcctcgtaatggagtttaccagccttcagccattctgccagctgttttgctccctcagaaaaacgatcggagtagtcgcttacgataaagccttgcatcagcgacttcgttttaatgagttttgattggacacgagggcccatgtcatctgcttcgctttctgcgttataggaagaaatggcgccgcacaccggaatgcgggcaaattcattgagcagattcatcaccgcgtctgaaatcggtccgccgacattgtcaaaatacacatcgacaccgtcaggacaagcgttttgaagcgctttttggatatcatccgctgttttgtaattgatggcttcgtcaaactgaagctcctgttttaaatagtcgattttttcatcagagcccgcgatgccgacgactcgcgcgcctttgattttggcaatttgcccgactgttgaaccgacggctccggcagctcctgagacaaccacggtttcgccttccttcgggcgtccgatgtccagcaatccgaagtatgctgttaagccggtcattcccaaaatgccgagataggccgaagcgggagcaaggcttgtatcaatttttcgcaaggcagactcgctcacagcggaaaattcctgccagctgagatttccgatgacgatatcgccttttttcagatgattcccgtctgacacaacttcagcgataacccctccagaaagcgctttatccaaggcgaacggctcaacatatgacttcgtatcctgcatacggccgcgcatataagggtcaaccgatacataaagcgttttgacaagcacttccccttgcttgggttcaggaaccggaatggtttcaaagcgaaagtcttcatgaacaggaataccttgtggacgtcttgctaattgaatttgctgctgagatgctgtcattttcatcctcctatcacttggttgacaccactgtaacatggacaggagaggaaatacaaaaggtaagctggcatacaaaaaaggttatagatgagcttatgctttctacaagctcttttgttttaaaagttctctttagtcatttatcattattagaaaacagaacagaaaaagagctcctgtacacctagctaagattggctagtgtgtatgtcgattctttttcatattcttgcaagcatctgcgagggggagcttagtcgttcacattttgctttcgcatcaatctgcaatagcaaagtctatgcgatttttttacatcagcaaagatttgttcaattttttccttttatgccgagtttttctgaaacagataattgatggtactcaaccattttcttttggtcaataaagtaatgtttacttattaattaaacacgcgaaaaagcaaacgaaaacataattaaattttatatatttattaaaagcttatatgtttatttaccttttttttgaattgtaattgagaaaatccatatattgcggacactaataaaagaatacctgctgaaacataaactaaacgaactccaaggaaatctgaaatagcccctatagccagaattgaaaacataaaaatgaactgtactaaagaagaccttgcagacattatattaattcgagtttgctcggttgttatgttctgaataagtgtttcttgtgtaagatctcttaatatataagccggccccataaagagaaccaaaattagagctaagtatgaattacttataaaaccatatattaaagttaaacttccatatgagacagcgccaattaacataaaattaattaacttattttgaaatctctccgacagcttatatattataaatccccctatcatcgaacctaaataatatgctccattaataaatccccaccatgattctcctttatgcaagacttcgttaacgaaagctaaagagacagatcctatccaaatcattcctgcccatgactcaattaaatccataataataattgttctaagtttcttttggctaaataaataccgccaaccacttactatactcttattgggagaatttttttcacgtatgacagaattagcgtggccatgtggtagacaaaataaaagagaaagaagagatgtaaacaacaaaaagatagtaagtataatggtatatccctcacctaaaaatgcaattatgagaccacctaaagaccagcctacaaattgaaaagtttggtccactgtagataataatccatttgcttttactcttctatcaggagagattatttcccctataattgcactttttaaaggtgagaaccatccattaaaaaaggaaatacagctaataataataaagactaaaatgagagtttgattagagtaagttcttaataaagcatagaacaaacatattaataacagcatttgtatcaattgagaaataattattgtaagaggcagttttaatcgaattgttattaacggtaatatagcacttccaaaaatacgaaaaataatacttattaatgtcaccatagaggcgatggttgtcgaattggtcattttaaacaaaaacgaaatcactaccatagtatatagagaaaaacctaaatttgtagtggtctggctaaataaaatagaataataacctttactcatatgtatcctcccttggaataatttttctcggtaaagagcttaaacatatttaaacaccttaaaacaacaaaagtaaagaaaaaatttccttgtaaactatttacttttattctatttattgttattgtttatttaagttctctgactattctatcaatattcagggaaccacatatcttattaaaggggggaaaaccatgagaaaattaagaaaaaactggagaaaatcgattgttagcccggttctttatactaatgaaaaatggtaaacacttagggaatagcatttaatgctattccttatttcaacaaacaaatcgggaggttatcgtaatttgactctattaatgcaagatcataaatcaatttacaataaagatatagaaatattaattgaagttgaagaacttattacttctgttccagaaaataaaaaaaatgattttaagagtttaatcgataatagaattatgactctactaaataaaattcaacaccctgtagcagcggaaaatgtgtttgggatgtgtattgcttatccgaatacttacataaggtatagattaattgatttcgttgaaaaatgggtaccttatttctctgctgtagaaactataatcaatctaacccaggatccggatgatttagtttcttttaaagctatggatgtctgtgcaaatcataaaattgaagaatctgtagcatatttgtcttcgattattgatgatgtccgggagagtataagctaccctaaaaaacctgtgggattaggggcccaaaaagtattaagtacattattagatatattcggtgttgaaaaacatgaagagctagtaatgctaaaaaattattttgatcaaaatggtatacttcctaataactttgactttgaagaaaaaattcctcaaagtctaatagaggaattcgaaaaaacagaagaagatgggatgattttaattccgggtggcttttttgaattcggtttaaatgaaaatgaaattcctgacaaaacatttaattggaaagatgctgttcctagacaaaaagtatggttacctccattttttatcgataagtatcctgttacaaataaagattatgatatctttaccgagttcatagaggaaaatgggcatatattctgtcatcctaatgaaccgcagaataaacaacatagaagaaatacatattgggatgataggtatttagataatcatcccgttacaggtatagatttttatgatgcatttgcttacgcaagatataaggggaaagaattgccaaccgagtttcaatgggaaaaagctgctcgaggcgaaaagggtaatgtctggccttggggagataaatttgatcctgcaaaggttcaatatgctggaagtctttataatgaacccattacttctttaaagtcctggagagaaaatttattaaaagctcatgctgataaagaattaaatcatttaacaagtgatatttttgaacaaaatggtgaaagtccctatggagtatgcggtatgatcggcggaacatgggagtggactagaagtgagcttaaaacaaagagagctttccaccctatttttgagaatgtaccatttaatagtgttaactcatttgccgttcttaaaggaggatcattcttctctcatccaggcttaatgttcccttcttttagagcaaaagatattcctttctgtcgacacaatgaaatggggattagatgcgtaaagaatattccagtatataaaattagagaatcaattaatgggccaattactaataaagcaatttattaatcattctaggttagagacttgataaaagtatactaacattgtgtagtaatgttcagcttgtagaaaaaacaatgttttttctacaagattttattttaaatgcttttcaaaattatcagggattgagaatcagaaaaagagccattaagctcgatcttagctaggtattacgatcttctgtatattattgtgagaaatatagaagattcagttagttagcatttcgattttaagctgagcctgcaatagcaaagcatctgttttgattattctttttctgatacataagctaattttgtcgcttttcttttttgtcttttcacgcatttcgaggatgacttactataattctttcagcttttctatgtgttaagattcgaatagatgaaataactttaacaagttggtcaataagaacagatttaactttatgttaaaagagtatctcgtatagaacataagaagaatgacgagttttttaagattatcatcaattatgtgagaataaaatattataagggaaaatgaaggctgtcacgtttctcgacagccctagggaattcctctccttttcatttcgcccgtaatttcgggcacagtcccgtcggcaggcacattggcttctggtcgatcgggcttctcatgatgcagcattccaagccgaagacttcacggaaaaatggctgggtgaacacatcttccggtgttccggcgttgtatatttttccgtccagcacactgatcagatagtcagcatattgagcggcttggtttaaatcatggagcaccatgacaacggtgcggccatggtcgcggttcagctttttcagcagttcaagcacttcaatctgatgtgagatgtctaaatacgtggtcggctcatcaagcaaaagcaaatcagtgccttgcgcaagtgccatggaaatccaggctctttgtctttggccgcctgagagggcatcaagtgtccgatccttcagttcaatcatgcccgttgcttccagcgcccactctaccatgtcatgatcctcttgggtatgcttggataacagctttttgtgaggatgtctgccaaaatagcataattcctctaccgtcaatccttcaggagcctgaggagattgtggaagaatggccagtttttttgcgacttcttttgatggctggcggtggatgtcttttccttctagtagcactgtaccgctttttggggccatcagcctggcgagcgatttgaggattgttgatttaccgcagccattagcgccgatgagcgcagtgatttttccttcttctatctttaagtcgactccgtcaataatcactgtactgtcatatgaaagagtgagctggtctgcagccagttttcccatggtatcctctccctactgtttcctcgcttcgaatttcaataaatataagaaataaggcgcgccgatcacggctgtcagtattccggcaggtatttcaaccggaggcatgatgccgcgccctaacgtatctgcaattaataatataatagcaccaatcaatgccgatgcaggcagtaaatatttagctttttctccggtaagccgtctggcgatatgcggagcaagcaagccgataaaaccgattgagccgacgacggctacacagcttcccgccagcgccaccgcggtgaaaatcaggatgaatctcagccggtttgcgttttctccgagaccctgtgcaagctcatccccgagtgacataagatccagcttcggtatgagtatgcagacgatcggaaaaagaatcaaaagccatggcgcaagcagcttgacttcttcccagtttcttccccagaggcttcctgtcagccaaatgagtgcagcattcacgtcgcctggaaacttgaccatcatatattgcattccggcgtggcagaccgcgcctaaagcaatgcctgataaagccagtgaagagggctgaatgctcttttttcgggctatcattaataatagtacagcaataatggcggctccggcaaatgcggagaacggaagcacgtataccggcgactcaggaaagatgagaatcacagccatcgccgcaagtccggagccttttgaaatgccgacaacgtccggggaagcgagcggatttcggatcacaccctgtaaaatcgctccggcagcggcaagtccagcacctgccaaaatcgctaatataatgcggggaaggcgatattgctggatgataaattcaaaggaatgatccagtcccagcagattcgtcactaccgcatcaggtgaaatgtataatgcaccgattccaatgctgatgacggacagaacgattaaaatcacggccaatatgagtatcgccagtaaggggcgtttttgttttctggttgttttcttcatttcaggtttcgccctttccttgccaaatataagaaaaacggcgttccgataatcgcggtgacaatgccgaccggtgattcataaggaaatgcaatccatctggccagaacatctgcgtacaccagcaaaatggcaccgaacagtgccgaaaacggaagcacgtattgataatgttctccgatcagcttgcggacaatatgcgggacgagcagcccgacaaagccaatcggcccggcgacggctacggaagcgccggaaagaattaaaataatcaaactgatcagaatcctgatgccgttcatattttgtccaagcccttttgctgtttcgtctccgagaccgagaacagaaacagaaccggaaaatacgagggcaagcccgatgccaatgacagaaaaaggagcgatggttatgacgtcctgccagttgctgccgtcgattgcgcctgtcatccagtacagaacatcctcacctgactcatttaaaataatgatggcctgtgtcatagaggagaggaacaagtgcacggccattcctgacagcgccagcttgacaggcgtcattccgccggatgaggcaatcatatacacaatcgcgccgcctgctgccgcacccgcaaaagcgaatataacagatgaatagggcgatgccggcagaatgacgagagaagcaacaacaaaaagcgatgcacccgcattcacaccgaaaatttggggtgaagccagaggatttctggtcatagcctgcatcagcgcccctgctacagctaggctggcgccgacaaaaacgccgattaatgtgcggggaaggcgaagagtagagatgatgagctgttcctttgaaccgtcccatacaaaaagatatttcaatgaatctatgatgctgatgtctgaggctcctactgaaagattcagcccaagcccaaatataaaaataatcagtgcaatgataaacatcatcagtcttgatgatgagcgccgtttggctgaatgatacaacagtctcacttccttactgcgtctggttgcaaaaacgaagaagcaaggattcccctcgcttctcatttgtcctatttattatacacttttttaagcacatctttggcgcttgtttcactagacttgatgcctctgaatcttgtccaagtgtcacggtccgcatcatagacttgtccatttttcaccgctttgagatttttccagagcgggttcgttttccactcatctacaatggttttgccttcgttggctgagatgaacaaaatatcaggatcgattttgctcaattgctcaaggctgacctcttgataggcgttatctgacttcacagcgtgtgtaaagcctagcattttaaagatttctccgtcataggatgatgatgtatgaagctggaaggaatccgctcttgcaacgccgagaacgatgttgcggttttcatctttcggaagttcggcttttagatcgttgatgacttttttgtgctcggcaagcttttcttttccttcatcttctttatttaatgctttagcaatggtcgtaaagctgtcgatcgtttcgtcatatgtcgcttcacggctttttaattcaatcgtcggggcgatttttttcagctgtttataaatgtttttatggcgctcagcgtcagcgatgattaaatcaggcttcaaggaactgatgacctcaagattgggttcgctgcgtgtgcctacagatgtgtaatcaatggagctgccgacaagctttttaatcatatcttttttgttgtcatctgcgatgcccaccggcgtaatgccgagattgtgaacggcatccaagaatgaaagctcaagcacaaccacccgcttaggtgtgccgcttactgtcgtttttccttcttcgtcatggatcactctggaatccttagactcgcttttgccgcttccgttgttattctggcttgatgaacagccggatacaatgaggcaggcgagcaataaaacactcatgatggcaatcaacttgttagaataggtgcgcatgtcattcttccttttttcagatttagtaatgagaatcattatcacatgtaacactataatagcatggcttatcatgtcaatatttttttagtaaagaaagctgcgtttttactgctttctcatgaaagcatcatcagacacaaataagtggtatgcagcgttaccgtgtcttcgagacaaaaacgcatgggcgttggctttagaggtttcgaacatatcagcagtgacataaggaaggagagtgctgagataaccggacaatttcttttctatttcatctgttagtgcaaattcaatgtcgccgatattcatgataatcgagaaaacaaagtcgatatcgatatgaaaatgttcctcggcaaaaaccgcaagctcgtgaattcctggtgaacatccggcacgcttatggaaaatctgtttgactaaatcactcacaatccaagcattgtattgctgttctggtgaaaagtattgcattagacatacctcctgctcgtacggataaaggcagcgtttcatggtcgtgtgctccgtgcagcggcttctccttaattttgatttttctgaaaataggtcccgttcctatcactttaccatggacggaaaacaaatagctactaccattcctcctgtttttctcttcaatgttctggaatctgtttcaggtacagacgatcgggtatgaaagaaatatagaaaacatgaaggaggaatatcgacatgaaaccagttgtaaaagagtatacaaatgacgaacagctcatgaaagatgtagaggaattgcagaaaatgggtgttgcgaaagaggatgtatacgtcttagctcacgacgatgacagaacggaacgcctggctgacaacacgaacgccaacacgatcggagccaaagaaacaggtttcaagcacgcggtgggaaatatcttcaataaaaaaggagacgagctccgcaataaaattcacgaaatcggtttttctgaagatgaagccgctcaatttgaaaaacgcttagatgaaggaaaagtgcttctctttgtgacagataacgaaaaagtgaaagcttgggcataaagcaaggaaaaaaccaaaaggccaatgtcggccttttggtttttttgcggtctttgcggtgggattttgcagaatgccgcaataggatagcggaacattttcggttctgaatgtccctcaatttgctattatatttttgtgataaattggaataaaatctcacaaaatagaaaatgggggtacatagtggatgaaaaaagtgatgttagctacggctttgtttttaggattgactccagctggcgcgaacgcagctgatttaggccaccagacgttgggatccaatgatggctggggcgcgtactcgaccggcacgacaggcggatcaaaagcatcctcctcaaatgtgtataccgtcagcaacagaaaccagcttgtctcggcattagggaaggaaacgaacacaacgccaaaaatcatttatatcaagggaacgattgacatgaacgtggatgacaatctgaagccgcttggcctaaatgactataaagatccggagtatgatttggacaaatatttgaaagcctatgatcctagcacatggggcaaaaaagagccgtcgggaacacaagaagaagcgagagcacgctctcagaaaaaccaaaaagcacgggtcatggtggatatccctgcaaacacgacgatcgtcggttcagggactaacgctaaagtcgtgggaggaaacttccaaatcaagagtgataacgtcattattcgcaacattgaattccaggatgcctatgactattttccgcaatgggatccgactgacggaagctcagggaactggaactcacaatacgacaacatcacgataaacggcggcacacacatctggattgatcactgtacatttaatgacggttcgcgtccggacagcacatcaccgaaatattatggaagaaaatatcagcaccatgacggccaaacggatgcttccaacggtgctaactatatcacgatgtcctacaactattatcacgatcatgataaaagctccattttcggatcaagtgacagcaaaacctccgatgacggcaaattaaaaattacgctgcatcataaccgctataaaaatattgtccagcgcgcgccgagagtccgcttcgggcaagtgcacgtatacaacaactattatgaaggaagcacaagctcttcaagttatccttttagctatgcatggggaatcggaaagtcatctaaaatctatgcccaaaacaatgtcattgacgtaccgggactgtcagctgctaaaacgatcagcgtattcagcgggggaacggctttatatgactccggcacgttgctgaacggcacacagatcaacgcatcggctgcaaacgggctgagctcttctgtcggctggacgccgtctctgcatggatcgattgatgcttctgctaatgtgaaatcaaatgttataaatcaagcgggtgcgggtaaattaaattaagaaagtgaaaaacacaaagggtgctaacctttgtgttttttaattaattaaaatgtttattaacttagttaaggagtagaatggaaaaggggatcggaaaacaagtatataggaggagacctatttatggcttcagaaaaagacgcaggaaaacagtcagcagtaaagcttgttccattgcttattactgtcgctgtgggactaatcatctggtttattcccgctccgtccggacttgaacctaaagcttggcatttgtttgcgatttttgtcgcaacaattatcggctttatctccaagcccttgccaatgggtgcaattgcaatttttgcattggcggttactgcactaactggaacactatcaattgaggatacattaagcggattcgggaataagaccatttggcttatcgttatcgcattctttatttcccggggatttatcaaaaccggtctcggtgcgagaatttcgtatgtattcgttcagaaattcggaaaaaaaacccttggactttcttattcactgctattcagtgatttaatactttcacctgctattccaagtaatacggcgcgtgcaggaggcattatatttcctattatcagatcattatccgaaacattcggatcaagcccggcaaatggaacagagagaaaaatcggtgcattcttattaaaaaccggttttcaggggaatctgatcacatctgctatgttcctgacagcgatggcggcgaacccgctgattgccaagctggcccatgatgtcgcaggggtggacttaacatggacaagctgggcaattgccgcgattgtaccgggacttgtaagcttaatcatcacgccgcttgtgatttacaaactgtatccgccggaaatcaaagaaacaccggatgcggcgaaaatcgcaacagaaaaactgaaagaaatgggaccgttcaaaaaatcggagctttccatggttatcgtgtttcttttggtgcttgtgctgtggatttttggcggcagcttcaacatcgacgctaccacaaccgcattgatcggtttggccgttctcttattatcacaagttctgacttgggatgatatcaagaaagaacagggcgcttgggatacgctcacttggtttgcggcgcttgtcatgctcgccaacttcttgaatgaattaggcatggtgtcttggttcagtaatgccatgaaatcatccgtatcagggttctcttggattgtggcattcatcattttaattgttgtgtattattactctcactatttctttgcaagtgcgacagcccacatcagtgcgatgtattcagcatttttggctgtcgtcgtggcagcgggcgcaccgccgcttttagcagcgctgagcctcgcgttcatcagcaacctgttcgggtcaacgactcactacggttctggagcggctccggtcttcttcggagcaggctacatcccgcaaggcaaatggtggtccatcggatttatcctgtcgattgttcatatcatcgtatggcttgtgatcggcggattatggtggaaagtactaggaatatggtagaaagaaaaaggcagacgcggtctgcctttttttattttcactccttcgtaagaaaatggattttgaaaaatgagaaaattccctgtgaaaaatggtatgatctaggtagaaaggacggctggtgctgtggtgaaaaagcggttccatttttccctgcaaacaaaaataatggggctgattgcggctctgctggtctttgtcattggtgtgctgaccattacgttagccgttcagcatacacagggagaacggagacaggcagagcagctggcggttcaaacggcgagaaccatttcctatatgccgccggttaaagagctcattgagagaaaagacggacatgcggctcagacgcaagaggtcattgaacaaatgaaagaacagactggtgcgtttgccatttatgttttgaacgaaaaaggagacattcgcagcgcctctggaaaaagcggattaaagaaactggagcgcagcagagaaattttgtttggcggttcgcatgtttctgaaacaaaagcggatggacgaagagtgatcagagggagcgcgccgattataaaagaacagaagggatacagccaagtgatcggcagcgtgtctgttgattttctgcaaacggagacagagcaaagcatcaaaaagcatttgagaaatttgagtgtgattgctgtgcttgtactgctgctcggatttattggcgccgccgtgctggcgaaaagcatcagaaaggatacgctcgggcttgaaccgcatgagatcgcggctctatatcgtgagaggaacgcaatgcttttcgcgattcgagaagggattattgccaccaatcgtgaaggcgtcgtcaccatgatgaacgtatcggcggccgagatgctgaagctgcccgagcctgtgatccatcttcctatagatgacgtcatgccgggagcagggctgatgtctgtgcttgaaaaaggagaaatgctgccgaaccaggaagtaagcgtcaacgatcaagtgtttattatcaatacgaaagtgatgaatcaaggcgggcaggcgtatgggattgtcgtcagcttcagggagaaaacagagctgaagaagctgatcgacacattgacagaggttcgcaaatattcagaggatctcagggcgcagactcatgaattttcaaataagctttatgcgattttagggctgcttgagcttggggagtatgatgaagccattgatctgattaaagaggaatatgcgatacaaaatgaacagcatgatcttttattccataacatccattcgcagcaggtgcaggccattttgttagggaaaataagcaaggcatcggaaaagaaggtcaagctggtgattgatgagaacagctcactcgcgcctcttcctgcgcatatcggcttgtcccatcttattacgattattggcaatttaattgataacgctttcgaagctgtagcggagcaaagcgtgaaggaagttttgttttttatcacggatatgggccatgacattgtcattgaagtatcagacacagggcccggtgtgccgccagagaaaatagaagctgtgtttgagagaggctattcttcaaaggggatgaggagaggctacggtctggccaatgtgaaagactcagtgcgtgaactgggcggctggatcgaactggcgaatcaaaaaactggcggggcggtattcactgtatttataccgaaggagaaacaaagggggaatccatttgattcacatcgcgattgcggaggatgattttcgagttgcgcaaatccatgagagattgattaaacagcttgatggattcaagattatcggcaaggcggctaacgcaaaagagacattggcgcttttgaaggaacacaaggctgatttgcttctgctggatatttatatgccggacgagcttgggaccgcgttgattcctgatatacgaagccgatttcctgaagtggacattatgattatcacagcggcaacagaaacccgtcatttgcaggaagcgctaagggcgggaattgcccactatttgatcaaacccgtaacagctgacaagttcaggcaggtgctgcttcagtataaagaaaaaaggaagctgctcatgtctcagccggaggtcagccaatccatgatcgaccatatttttgggaacggtgtgaagacagctttgccggcagaggatttgccgactggcattaattcgattacactgcgaaaaattaaggaagcgcttcagactgcgtcagaaggattgacagcggaggaacttggggaaaaaatgggggcgtcacgaacaactgcccgccgttatgccgagtaccttgtgtcaaaggaagaagcaagagccgagcttgaatacgggattatcggcaggccggagagaaaatattatttggcggcggattagatatgaaaaaatctataatcctattgaatattctattgatctttatgcagggtgatatcaggcaggcggctgcgccgcgcctgccggacgggccgatagaaattgtcgtccctgccgaaccttctggcggctgggatgtcacagcgcaggcgatccaatcagttttgaggcagaagcagatcgtgaaggatgatgttcatatcgtctataaatccggcggcgggggagagaaaggctggaaatatgtcaacaaaagcagcaaacaaaccatcagcatgacgtccagcctaatattgagcaatgatcttctcgggcaaagcaaattaaaaatgtccgattttacgccgctcgccattctctccaaggaatggcagacggttgcattgccaaaaggatcagcgttaacaaatggcaaggatgtgctgaatgagatcaacatgcatcccggcaaggtgagaatcggctttgccccggggtttggcaatgatgatcagctctcgttcgtcagagcggcagatatgtacggcattgacccgtttgacattcaattctcacagtatgacagcagcgaacagctcattcaggcgctgatcagacatgagatagaagcggcttccatgacactttctgaagcgaaaccatatgaacgaaacggcgatatcacgttagccgctgtaacgtctgataaaagacttcccggttttccaaatgtaccgacgtggaaggagcagggaatcccgtttgttttttctcattggagagggattttgggcccgaaaaatatgtctgaggaagagatttcttactgggatcaagcgctaaagaaggtcacctcctcacctgaatggaagcggaaaataaacgaacaggactgggaaagcttttatttaaacagcagggaaacgaaacggtttttagaagagcaatctgctttttatcaaagcatcatgacaggaaattaaaatcccgacatcccgggatttttttcatgccgaaaattgatcaaaaagaacaaaacggttttaaaaaattaaaaatacaaaaaaaccaaattatttacttgcggttggttttcccatacgatggcaaaaaggcaagacaaaaaggggagtaagggagaaaaaaatgtaagcggattcatttaagggggaatggatgtgttagcaatcttaggctttctcatgatgcttgtgtttatggcattgatcatgacaaaacggctttctgttttaacagcattagttttgacgccgattgtgtttgcgcttatcgccggatttggatttactgaagttggggacatgatgatttcggggattcagcaagtcgcgccgactgcggtcatgattatgtttgcgatcttatattttggaattatgattgatacaggcctgtttgatccaatggttggcaaaattttaagcatggtcaaaggagaccctttaaaaattgttgtcgggacagcggttcttacaatgctcgtcgccttggacggagatggctcgacaacgtacatgattacgacaagcgccatgcttccgctctatttgctgctaggcatccggccaattatcttggcaggaatcgcgggagtcggcatgggaatcatgaacacgattccatggggaggtgcgacgccgagggcggcgagtgcgctgggggttgatccagctgagcttacagggccgatgattcctgtcattgcaagcgggatgctttgtatggtggcagttgcgtatgtgcttggaaaagcggaacgaaagcgccttggtgtgattgaactgaaacagccagccaatgccaatgaaccggctgctgcggttgaagatgagtggaagcggccgaagctttggtggttcaatttattgttaacgctttctttaataggatgtttagtatcgggtaaagtcagtttaaccgtactgtttgtcattgcgttttgtattgcgctgattgtgaattatcccaatctcgagcatcagagacagcgcatcgcggcgcattccagcaacgtgctggctatcggttcaatgatttttgctgcgggggtgttcacggggattttgacaggcacgaaaatggttgatgaaatggcgatctcgctcgtgtccatgataccggaacaaatgggcggattgatcccggcgattgttgccttaacaagcggcattttcacatttttgatgccgaatgacgcgtatttctacggggtgctgccgattttatcagaaacagctgtcgcatacggtgtggataaagtggaaattgccagagcctctattatcggccagccgattcatatgctgagtccgcttgtgccatccactcatttgcttgtcggactcgtcggagtttctattgatgaccatcaaaaattcgcattgaaatgggcggttctcgcagtgatcgtcatgacggctatcgctctattgatcggtgcgatctctatttccgtatgataattcaggcgtaatgacacacactaacggcatacaacattccggaggtgtcattatgagtgatccttatatgccgctgacttcagtcagaagcggagcggggttcgaagcggcaaaaggggtgcacggcctgactgtgcaaattgcgaatgtctattttattcagctgccttctgaacctcactcatttgttttaattgatgccggcatgccccaatcagccggcgtgattgtcaatgaagccaaacaaagattcggtgaagggtttcagctgaaggcgattatcctcacacacgggcactttgaccatattggggcaatcgaagagatccttgagcattgggatgtgcctgtttatatccattctcgggaaatgccttatgtaacaggtaaagaggattatcctccggctcgtcctgacagcaagagcgggctggtcgctaagctgtcgccgctgtttccgcggcactctatcgatatttcctcacatgtccaggcactgccggaagacggttcagttccttttcttgacgagtggatgtggatcgcgacaccaggacacacgccgggccatatttcgttattccgcgatgacggccgcgtgcttgtggcaggtgatgctgttattacagtggaacaggagaaaatggctgacgtcttgatacaaaaacaggagcttcacgggccgccggcttatttcacgcctgacacagagacggccgctgagtccattctaaagctggccggtcttgaaccggaagcgttattgaccgggcacggcataccgatgaccggcaaaaactttcgaagtgacttaactgaattggcaaatcggttatcgtctatttgacacccgcaccacgcgggtgttttttattgttttccaggaagttgcagaaaaatcatttgtcttgccgcttaaaaacgatacaatgaaaagcatgaagtgatgtgaaggggagagtttgttggaagaaaaagaaatactctggaacgaagcgaaagcgtttattgccgcatgctatcaggaattgggaaaggaggaggaagtgaaagaccgtctcgcggacattaaaagtgaaattgacctgaccggaagctatgtacatacgaaggaagagctggagcacggagcgaaaatggcttggagaaacagcaaccgctgcatcggcagattgttctggaattcgctgaatgttatcgacagacgagacgtccggacgaaggaggaagtgcgtgatgccctctttcaccatattgaaaccgccaccaataacgggaaaatcagaccgaccattacgattttccctccggaagagaagggtgaaaagcaagtcgagatctggaatcatcagctgatccggtacgctggatatgagtcagacggagaaagaatcggcgacccggcttcctgttccctgacagcagcctgcgaagagctcggctggcgcggagagcgaacggattttgacctgctgccgctcatttttcgcatgaaaggggacgagcagcctgtctggtatgagctgccgcgttcacttgtgattgaggttccaatcacacatccggacatcgaggcgttttctgatttggagctgaagtggtacggcgtgcctattatttctgatatgaagcttgaggtcgggggcattcattataatgccgcgccatttaacggctggtatatgggcacggagatcggagcgagaaacctcgcagatgaaaagcggtacgacaagctcaaaaaagtagcgtccgtgatcggcatcgccgctgattacaatacggatttatggaaggatcaagcgctagttgaattgaataaagctgtgctgcactcgtataaaaagcagggtgtcagcatcgttgaccatcatacagcggcaagccagtttaaacggtttgaagaacaggaggaagaagcgggcagaaagctgacgggggactggacgtggctgattccgccaatttcacccgctgccactcatatcttccaccgctcctatgataactcaatcgttaagccgaactatttttatcaagataagccttatgagtaaacaatagaaaatcgatgatggccttcaaggctgcgggattcagtcacagagatgtcggtaacctttgagaaagggcttccgttctttacagcctcaacaaacgattgcagggcgttttccggaccctctgccaaaatctcgacacgcccgtcatcacggtttttgacccagccggccagttttcgcttatcagcttccatttgaacaaaatagcgaaagcccacaccttgaacccggccgtctacaatgattcggtattgaagcatgtaaaaaccaccttttctttttatgataatcaatcattttacaacctgtaaaggggatgtgtttgtatgaaacaagagcgctattcagttctttctcttaatctgggaaaaccgcagacgcttgaatatgacggaaagaaaatcgaaaccggcatcatgaagcggccggctaaatcagccgtcatgctgtatcgggagaattttgaaggagacggacaggcggacctcgtcaaccacggcggacctgataaggctgtctgtgtctacccggcggagcattatccgttttgggaagagttcctctcaagaccgctgtcaaatgccgcatttggagaaaatctgacggtcgcgggcctgactgaggagaatgtttgcatcggggatgtgttcagacttgatgaagctgttgttcaggtcagccagccgcgccagccgtgtgtaaagctggcgaaaaagtttggtgtaaaagaaatggtgctgaaggtccagcaaaccggctatacagggttttattttcgcgtgctggaggagggcagggtgtctcccggcgcgaaccttgaattgctgtccagaggagagaaaggcatatccgtccagttcgcgaaccgcatcaactaccatgatgcaaaaaatctcaccgccattgaacggattttaagtgaggctgcactatcggaaagctggagagcgtcctttatgaaaaaaaaggacaggctgctgccggttgaatagaaaaaagccgcgcatatcaacgtgcgcggctttgccatatttaagattgttttttctttgattcaagcaggttggcaagaaaataggttttatagctttgaagctttcttccttcatggtgcgtgatcccctgcttttttagttctgccacataccagcctttactgccgtaatgcatgtcagaaaactcctttccctatctgatttcgaaacgattggcattgtaacatctataaaaagatgctgaaaagagatgcggggaaaactgagcctttcgcactagatgtacgaatgttcttctgaatgtatatgcggagcaaaagccgaatatgatttaatggccggttagtttgatcatgacaacgccaaatgtcataatggcgaaaacaatgccgatatatgtgagcatcccgttttttttcttaacgccgtaaacggtcataatgatgccttcaatgaaaaaaatgatgccgaaaataataaaccacatgcagataaaggctcctttcacagacataatagtagtgtagcatatctgaaagagccgggctgtgacaatatcaagaaagccgggcgcatatcgcccggctcatgttttattgtttatcaaccaatttgaccagaagctgtgccaaatgttctttctcatcttcgtctgcaacgctccaaagctcttgcagcagcatttcttcaccgttttgcggctcttcatgctttgcgaggtagtctcccaggatcgcagcgctttttacaagcttgccgtcatccaatcccagctttttgcctcggttgacttgttttttcaggtagcctttaaattcctcaaagtcttttaaaatgtcttcttttattgtgccatgcatcgcgttcatttcgttttcaatttggattttttcttgatctctgttcattgcaagacctcctcgtacagaataatgatgctttacctgcaattggaggaggttaaacctgccggaagcccggaatgtgttttacagtttcgtcaggataatcggttcatcttttgtgatgacgatcgtgtgttcaacttgggcaaccatgcttttatccggcgtcttgaacgtccagccgtctccagcttcaacaatcgtttctgctttcgttgaaataaacggttcaagcgcgatgactgtgccatttttgaacagcgcattatcaaacggatcataatagttcatgatgtggttcggcgcttcatgcaggcttcggccgattccgtggccggtcagggttttgatgacggtaaagccttgagagcgtgcttcatgataaacggctcttccgatctggttttggcgcttgcccgcttttgcctgctgaagccccttttgaaaagcgttttccgcgcattggcaaagcttatgaaggcgttcttctccttcaccgagcacaaatgagatgcctgtgtcggaatagaagccgccaaattcagcggagatgtcgatgttgacaaggtcccctgcttttaaaattttggatgtgcttggtatgccgtgagccacttcatcatttacgctgatacatgtcacacctggaaaatcgtattccttctcaggagctgaaacggcgccgtgctcatcaagcacagcttttccgataaggtcaaggtcttttgtgctcatgccgggctctgccttccgcttcatttcttcacgcgcaagcgcgacgattcttccgatttttttcaggccttctaattcttgatcgtttgttacaatcatctgtcattcccgctttctttttaaataatctagattaagcttaccacaactgtcttaaaaataggaaacacacggacctgggaaaaaagaaatacccccgggaaaattggtatagatcactagatatcttatatggtatatttgaaaaaaaagggtatgagggggatgggtatgctttcatttttacaaaaactcgggaagtcatttatgctcccgattgcggttctgcctgcggttggaattatccttgcgcttggcagagaggatgtatttaatatcccgtttgtctatcaggcggggacggcggtttttgatcatctgccgcttatttttgcgatcggtattgccatcggcatttcaaaagacagcaatggggcagcgggtttatcaggggcgatatcgtatctgatgcttgacgcggcaacaaagacaattgataaaacaaataacatggcggtgtttgggggaattattgccggtttaattgccggttacacctataaccgcttcaaggataccaagctgcctgaatatctcgggttcttcagtggcagacggcttgtgccgattttaacagccattattacgatcattttagcgggcatattcggagtggtctggccgccgattcaatcgtgtatcaactcgtttggagagtggatgctcgggctcggcggcatcggggcaggcatattcggcctattcaacaggctgttaattccgcttggccttcaccatgtgctgaacaatattttctggttccaattcggagaatataacggagtgacaggggatttggcgcgctttttcgcgaaagatccgactgcgggcacatatatgaccggatttttcccaatcatgatgttcggtcttccggcggcgtgtctggctatggttgtgactgcgaagccgtctaaacggaaagcgacggctggaatgatgattggatttgctttaacggcgtttatcacagggattacggagccgattgagtttgcatttatgtttttatctccgcttttatacgctgttcacgcggtcttaaccgggttatctttatttatcgtcaactggctcggcatccgctcaggcttctctttttcagccggagctatcgattatgtgctcagctatggaatcgcggaaaaaccgctgcttctgcttttggtaggtatatgctatgcggcagtatactttatcgtgttttatgtactgattaaggctttgaatttaaaaacgcctggacgggaagacgatgatgtggatgaagtgctggatgaaaatactgttcaggatgtaaatgaaaacatcatgctgaaagggctcggcggaaaagaaaaccttcaaaccattgatcattgcgccacaaggctgcgactgactgtgaaggataccgctttggtggatgaagcactgctaaagaaagcaggcgcaaaaggggttgtcaaatcgggcgggcaatcggttcaagtcattattggcccgaatgtggaatttgcagctgaggaattgagggctgctgtcaaataaaaaagcggagagggcaacctctccgctttttcttatttatcttcgttatcctttgacgtttcggaagaatcttcgtcatgttttgtgtaatcataatcagaaggattcaccttcttaaaacctttcggctcgtagaaccgcagcaggtctccgtttatgattttatcggacatttcaagttccttcttgacgagtgagtcttctgacttgtcgacttcggattcatcgagttcttttccggttttcgtgtcgtaatacttaccggatattttcgtgtacttcggtgaaataaagtctccgtttcggaacggaatcacttcacggtgttctttcgataaaatatcagaaccggacatcagatagtccttcgtatccactccgagcagatgcagaatggtaggagccacatcaacgtctccggcatatttatgaactttctcgcccttcacgccggcagcgtggataaagagcggcacccgttgaagctgggcgttgtcgtaatcagtgatttcatccttgccaagcactttcgccatcgctttattgtggttttcagagatgccgtagtggtctccgtacatcacaataatcgatttatcatataacccgtcttttttcagatcattgaagaattgttcaatggactgatcaaggtaatgggctgactggaaatagttatcgacgacagagtcaccaaagtctccagccgggaagtctgtatccccctcatccattccgaatgggaagtggttggaaagggtaatgaacttcgtatagaacggctgcggcaggctttccagcagcggcattgattctttgaagaacggtttgtctttcatgccgtagtttttcgtgttttcttcgttcatgtcatagtaagcagaatcaaagaatttatcaatgccttccgccttgtacatttcgttacggttccagaacgtctgcgtgttcccgtggaaagtagcagatgtgtaattcttagacttcagaatcgccggaacggattgcagcgtgttttgcgctttgtttacgaaaactgaaccttgagccagcgggtacagagagttttccatcataaattcagcatcagatgttttaccttgtcccgtttggtggaaaaagttatcaaagtagaacgtttcgttatcatgtgccagtttatttaagaatggtgtcacttctttgccgtcaattttatagtcgatgataaatgactgcaaagattcaagtgaaacgtaaatgacgttttttccttccgctttgccgaaatacacgttattcggcacatcgtaattggctttcatgtagttttctacttccgttacgtcgctggaatcggcaagcgcgcgctggctgttggacttgatattctgtacagcgtcataaatcgtgaaattgtatgttcccaagtatttcacaagatagttccggtcgaatgatcttgtcagcaattcaggacggtctgattccgcaactgccaggttgatcaagaacacaagaattgaagacgcaaaaataattcggaacgattttttgcttgacgtttcggcaggcttgtttactttgatcgccaagatgatcaggatgatcgtatcgataaagtaaaaggcgtcagtcggtctcatcagcgaaaatgcgctgtcaccgagttggccgccgtttgttttagcctgcataatgaccggaattgtaataaaatcattgaaaaatctgtagtacacaatgttggcgtacagtaaaaaagacattaaaaaatgaatcactataatggctgtctgctgtaattttttcttgaacaagagtccaaagccaagaaagaacaagcttgagctaagaggattcacaaaaagcaatattttttgtatcgtgttgtctattcctaagttgaaattcaggacataaccgacatacgttttgatccataacaggacgaccgcaattaagaagaaggccagtcctctttcttttataaatgttttcattgttacactccttttttccgatccagttcgagcgaaacgatagaaaaaacgaacgtatccaatataacacgaatcagcagattagaaaagtgaaaatcgtatgagggagaaagtggcgaaaaacgccgtcgaatcaacgtttcgctttgatattaccaaatgtaaaacaaggtatctttctagaaataaaggaataaaatggtacattgagaattgtatgataaaatataaggtatagataaaaagaggtgaaatgatggatttttcccatattgtgtctgaagataaaattaagcgcgccatcaaagacggggactttcaaaacctcccgggaatggggaagccgctgccgaaggatgacgcggcacacttgccggaatcgctgcgcatgggctatcgtattttgaaaaacgcgggaatggcagaggacgagggcgcgctcaaaaaagagcttatgaccatcgaccatttaatcgaaaagtgctatgacgaaaaagaacgcgagcaattaatcagaaaaaaatctgaaaagcaattgctgcttgataagcttgtcgacaaaaaaggcatgttttcaaagccagcatccgctttttataagaataaagtatatgaccggcttggacgaaacagaccttcttccagctgatttgtcttgtctgcaggatggcgattgataaaagccatcctttttatgttccaagttctatgtcaaaaggtttatgtttttccatctatgggaaatgattcataaacgaaaaaagggtgatgggatggaacgactattagtatggatagagcatatatctgattggctgtggggtccgccgctaatcatcctgctgacggggacgggcttgtatttcactattttgctgaaaggttttcaatttcgctatcctttatacattttcaaacagacaatcggcagtgtaggaaaaaagccgaagggagaaggcacagtcacaccgcttcaggcattgacctcagccctcagttcaacgatcggtgcagcgaacattgtcggtgtgcccgccgctattatgtttgggggaccaggagcggttttttggatgtggcttattgccttatttgccatggcgattaagttttctgaaagtgttcttgctgttcattacagagaaaaaaatgagcagggtgaatacgtcgggggaccgatgtattacataacaaaagggctgcgcatgaaatggctcggcgtattcttctctgttgcgctgattgtggagctgattcccagcattatggttcagggaaattcggtttcagtctcgcttgccgagacgttttctttcaataaaatatacgcaggaatcggaattgcatttttgattgggttagtggtgataggaggggtaaagcggatcggaaaagtaacagagtttgtcgtgcctcttatggcaggggcatacgcaggtgccggtctcctgattgttctcatgaatctatcatcagtgccggcgtttttctctctcgttttttcaaatgcgtttacctcttcttcagcagttggagggttcgcaggtgctgcgttggcggaaaccgttcgctggggatttgcccgcgggctgtattctaatgaagccgggatgggaacagccccgattgcacatgcggcagcaatgactgatcatcctgtgcggcaagggttttggtctgtgatcggcattgtcattgacaccttaatcatctgtacgactaccgcttttatcgtccttgcatccggtgtatggacagggaagaacgcctcaaatgacccggcagcactgacaacggccgcatttcagcactatttcggttctggaggaggatacttcgtttcggtttccctggtcttctttgtcgtatcaaccattatggttgtcattttttacggcgtaaagcaagctgaatttctgttcgggcggctggcaggacatgtgattaaattcgtttatttagcggctattatcataggtgccgcaggcggagcaaaagccatttggggcgtattggacttagcattggtttttattgttgtcccgaatgtgattgcgctcttgttattgagcagaaaggtaaaagcgctgtacaccgaattctttacatctgaacagtactacctgaaagatataagaaaaacgaaacaaaagcctgtttatccaacaaaagaagctaaaaattcctagtgttttgcttttgcgccgaacaatgctttgctttttatgatcaaataaatgagtaaaggcagcaaaagagaaatcactacattaatgattggtttgattctgttaaagtcgattagctgatttgtatttaaaaaaaaccaaaagccgcatacgactgagaacatgccggttggtgtatacatggctttcgggtcgatttttgagtgtaaaaacgaaaggccgtataccacgatatatagggaacctgctatcttcaccataatgaccggaatccaaaaagccgcgatgatcaggtctgagcgatccagaaaatccgtaatgcggatctgcctgatgaccatataagcaggatcaaagaaagtagatgtcaggttgggaccaaagacagaaattgaagaaaataacatcacggccagcaataaagcgcccagcagtatcgcgaaaatggtgtattttagcgggacgctccggtttgagaagagaagcggaaggataatcaattcccccattgtcccaaacgcgtaatagcctgattgaaggtatgggattagaccttcaaaaacaggtgtcaagttttgaagctcaatttgtgtggccagcgtaaatggaaggaacaagaccaggatgccgaatggaaataggaatatctgcgccattctggtcaatgtttcttttccctctctggcaatacagatcgccacaaagataataacaccgccaagaacagccattggtgttctcgggagaaataaaatgttaatcaaattgatgaaaaaacgtatatcatgagcattgattaacaggaaatacaaagaaaacagtaaaatgataatccggcctgcgattggtgaggaatcgctcagcagctcatagatatttttatcctgatgctttttcatcagcctatgcatgagccagagtgccggaatcacgatgacaacgccgaggatgtagctgtgccaggcattttgttttgctgattcgatcatgagaatcggagcatgctttaatccgactgctaacgtatacagagctccgaaaaataatccttggtatgcagaggtcttgtccataaagcacatcctttctgtcatgttcaaaacggaatatatttaaacaggtgccccagccgcggaagcaggggattcactctcatataaatccatagaaaagcacttcctgcaattagcaggctgaaggcccattttgttagattgttagcggaacgaaaattcttccattcatatgcgtatatggcaatgcacacaatcaatgtctgtacgatatagctgatcatgctgacgcacctccattaatggctgatcgttttgtataggacaccgccctgctcaatcgtcacaattgggacgacgtgaacctccatatccttatatacctcttcccattcctttttcagcagattcttcgtggttgccgtgcttctgatggtcctgtcttgaaagccggccgggtccgcctttagcttttgcaaacgatgaacggtgctgatcacgtccttctttatggttctgtttaatgctttttgaatgatgtaatactggtcattttctctcgtctcataggttgattggttttccataataattcctttggctctgatctcgattgtcattgacagctttccgtttttttcagcggcatgaaaggatgcattggacttttgaagctgaatggatgcttgccccatttgattcggcaggtctactatgaattctggctggcgggcttgattcagcaacatcagggctgctgtcatgtgttcatctttgaaaatatccatcaatctgtcctttttaaagatcgcaagcccgtcaattttcaaattagatttgcctttccctccaggttttgttttagatgcagagatgaccggtgcatacggatcactgcctatttctactagatcagacatgaatctgcttaagaaaacggggcggctcgttgcgataatggccagctcccgaatcatttccgccggaaactgttcaagctgaacatcggtatttaaaatgtcccgcgcttctccccggctgactaaaatgagcgccgttaatctgttctgcggatttcgcgttaaaatatcaaagactggggcaacgccgtctctcgccatatcctctccaataatgactgtacgtctgtgggacgtattgattgtccgtgacaaggaggtttgcagcttgttgttcgcttctctgatcgtagtgccggaagctgaatcaacataccatgtttttgaaccggcagttccgccgccgccccctgtttgtccgcctaattggccgaccaagggaatctgcatggccactcgatactgatcttttttcttatcaatggctgagctgacaacaaatgcaatgtcattgatttctgtccggtcccagcaccccgttagaaggatacaaatgagaagcggcaaaacacacttatatattgttttcttcatcttttgggtcctctcttttcgctcccttctgtccgttgccgcgcgaatacgtgcccggccttctggtcatcgtccaccaaggcgccctgacaaaaatatcttttacttcatctcgtttaaacggagaaatcccggataaataaggaatgccgaaagattgcagcttgcataaatgaagcactaagataatcgtgccgagcataatgccgaatatcccaaaaatactcgccaaaaacataagcgggaaacgaagcatcctgatggagatagctaagttaaaccgcggaattgtaaatgacgcgatccctgttaacgatacgatgatcaccatgggggcagacacaattcccgcttcaacagcggctgtcccaatgactagggccccgagaatactgacggtctggccgatggttttcggcaggcgcactcccgcctcacggagagcctcaaaagaaatttccataatcaatgcttctatgatggcggggaaaggaatcggttcacgcgcagaggccacactgaacattaagtttgtcggcattaagtcctggtggtatgtaataacggcaacataaatagccggcaaatataaagcaacgaataaaaacatatagcgaagccagcggattaagttagacatcaaataacgctcatagtaatcttcactggcctgcataagctgccaaaacgtaatcgggcctgttaagacaaagggcgtattatctgtgaaaatggcaaatcggccttcgagaagctgggcggcgacggtgtccggcctttctgtgtattgcagctgggggaatggcgagtacgtgtcgtcttcgataaattcttcaatatatccgctttctaagacagcatcaatctttatctttttgattcttttttttgctttgtcaataacctttggatcggcaagcccgtcaatataggccaagacaacatcggttttggttttcgtgccgattttaaaagagatcattttaagctgaaacgttttgacgcgaaagcgcacaagagcggtattgaccctgaggctttcagtgaagccctctcttgaccctctgatggtcgattctgttatcggctcttcaatgcttcttctttgtccgccttttatatttaagatcaggccttttgagtgcccgtcggcaaataaaaccgcgttcccctcaatgatggatgcagccactttgctcatactcgtttctaatgcaacacttgaaattgatagagtattttgcagcgcctcttcatgttcatctatttgatccgtcaaatgcattaagaaagggcggagggcgtgatcctgaatatgttcagattttacaattccttcgatataaacaataaatccgcacagcccgtttccaaagtcaaattgtctaaatacgatgtctgagcagccttctgttaataaggtcagattttcgaggttttccttcaaattgggagagatcggtctgtcctgattgtcttcaagctctttgatgagctgaagcgctttgtcgcgtttattcatagaggctcaccctgctttttaatgtcatattcaataagtgcttgtgacttttagggtaaccttgtctgtttcatatattccagactaggatgaaagcgctataaaaaagtgttgactacctgtatatacaggaatacaatatgattataagttgtatatacaagttataaaaacggatacggaggggttggcatgggggaactgaacaaatcggcacgtcagattgtcgaagcagtcggcggtgctgaaaatattgcagcggcaactcattgtgttacacgtttgcgttttgctttaatagatgaaagcaaggttgaccaagagatgcttgatcaaattgatgtggtaaagggatcattctcgacaaacggacagtttcaggtcgtaatcggccagggaactgtcaataaagtatatgctgaactggttaaggaaacggggattggcgagtcaacaaaggatgaagtgaagaaggcctcagaaaaaaatatgaatcctttgcagcgtgctgtgaaaacgcttgcagatatttttattccaatattgcctgcgattgtcacggcgggtcttttaatggggatcaataacattttaacggcggaaggcattttcttcagcacaaaatcgattgtgcaggtttatccgcagtgggcggatcttgctaatatgattaacctgattgcaggcacggcctttacgtttttgcctgcgttaatcggatggtctgccgtcaagcggttcggcggcaatccgcttctcggcattgtgctcggggttatgctcgtgcatcctgatttgctgaatgcgtggggatatggcgcggcagaacaaagcggagagatcccggtatggaatctattcggcctagaggtgcagaaagtcggctatcagggccaggtgctcccaattttgcttgcttcttatatgctggcgaagattgaggtatttttaacaaaacgcacacctgagggcatacagctgctcgttgtcgcaccaattacgcttctcttaacaggatttgcctcttttatcattatcggcccgattacatttgcgatcggtaatgtactgacttcagggcttatctcggtgtttggttcttttgccgcactgggcggtctgttatatggcggtttctactcagcgctcgtgattaccggtatgcatcacacgtttcttgcagtcgacctgcagctcatcggttcaaagctcggcggcacctttttatggccgatgctggcgctttctaatatcgcacaaggttcggcggctctggccatgatgtttatcgtgaaggatgagaaacaaaaaggcctctccctcacatcagggatttctgcttatcttggcattacagagcctgccatctttggggtgaatctgcgatacagattcccgtttatcattgcaatggtcagctctggcctggccggaatgtatatttcttctcaaggtgtgctggcaagctccgtcggtgtcggcggcgtgccggggattttctcaatcatgagccagtactggggcgcgtttgcaatcgggatggctattgtattgatcgtgccgtttgccggaacatacgcgtatgcgagattcaaacataaataacaagtggggagcgggacgtgttgaacgttcccttttcccgttttcaatttaaatatggtggtggaaacagatgaaaacagaacaaacgccatggtggaaaaaagctgtggtttatcaaatttatccgaaaagctttaacgatacgacaggaaatggtgttggcgatctgaacggcattattgaaaagctggattacttaaaaacgctacaggtggatgtgctttggctgacgccgatttatgattctccccagcatgataatgggtacgatattcgtgattattactcgatttatcctgaatacggaacgatggaggattttgagcggctagtgtccgaagcacataaaagagacctgaaagtcgtcatggatcttgttgtcaatcatacgtcaacagagcacaaatggtttcgcgaggcgatctcttcaatagacagcccgtaccgtgatttttatatatggaaaaaaccgcaggaaaacggttctgttccgacgaactgggaatcgaaattcggcggctcggcatgggagcttgacgaagcatcgggccaatactatttgcatctgtttgatgtgacgcaggctgatttgaattgggaaaatgaagaggtcagaaagcatgtctatgacatgatgcatttttggtttgaaaagggaatagacggctttaggcttgatgtcatcaacctgatttctaaagatcagcgctttccgaatgcggaggaaggcgacggccgctctttttacactgacgggccgcgggtgcacgaatttctgcatgaaatgaacgaaaaggtgttttcacattacgacagcatgacggtcggtgagatgtcttcaacaaccgtagaccactgcatccggtatacgaatcctgacaataaagaacttgatatgacattcagcttccatcatctcaaggttgactatcctaacggcgaaaaatgggccttggcgccgtttgattttttgaagctgaaggagatcctatctgactggcaaacggggatgcacgcaggagggggatggaacgctctgttctggtgcaatcatgatcagccgcgcgtcgtatcaagatatggagatgatggcgcatatagggtgaaatcggcgaaaatgcttgctacggccattcatatgatgcagggcacgccttatatttatcagggcgaggagctggggatgacgaatccgaagttcactgacataagctcctatcgggatgtcgaatcgctgaacatgtatcacgcctttaaggaaaaaggaatggctgatcaagatattacagccattttacaggcgaaatcccgtgacaattccagaacccccgttcagtgggatgctacggaaaatggtggttttacaacgggcacaccatggataccggttgcaggaaattaccgggaaatcaatgctgaagcggcgctgagggatcagaattcggtgttttaccattatcaaaaattgattcagattcgcaaaatgtatgacattgtgacagagggtacgtatgagataattgcaaaggatgacccgaacatttttgcgtatctcagacacggcagcaatgaaaagctgctcgtgatcaataatttttacgggacagaggcggcctttacactgccggactctttagcgcctgacgaatggaaggcagaggtgctgttgacgaacgatgaagcaagggaagggcttcagaacatgacgcttcgcccatatgagtccattgtttatcgtttaacgaaaccgtgttaaactaagctgggtggtccataatgaaggtgaataaattcatcacaatttataaagacatcgcacagcaaattgaaggcggccgatggaaagcggaggagattcttccgtctgaacatgagttgaccgcacagtacggtacatcaagagaaacggtccgaaaggcgcttcatatgctcgcgcaaaacggttatatccagaaaatcaggggaaaaggctccgtcgtgctcaatcgtgaaaaaatgcagtttcccgtttcgggccttgtcagcttcaaggagctcgcgcaaacgcttggcaaagaaacgaaaacaactgtacacaaattcgggctggagcctccgtcagagctgatccaaaaacagctccgggccaatctggatgacgacatctgggaagtcatcaggtctagaaagattgacggggaacatgtgattttggacaaggattactttttcagaaagcatgtccctcacctgacgaaagaaatttgtgaaaactccatatatgaatatatagaaggagagctcggtctttcgatcagttacgcccaaaaagaaattgtagccgagccgtgtacggacgaggacagagagctgctcgatttacgcggctatgaccatatggtcgtggtgagaaactacgtctttttggaggataccagtttgtttcaatatacggaaagcagacaccgtctcgacaaattccgatttgttgattttgcgcggcgggggaaatgagagaggcgcctgcctgcggcagcgcgcttttttgtttggtatcaaaattgatactatccaacaaaaatgtgcgtacttttactttttatcataatggctacaatagagatgagagtaatctaaaggagaggtgttttacatggcagatctaaagacacaaattctggatgcatacaatttcaggcatgcgactaaggaatttgacccgaataaaaaagtgtcagacagcgattttgaatttattttagaaacaggaagactgtctccgagctcactcggccttgagccttggaaatttgtcgtcgtccaaaatccggaattccgcgagaagcttcgtgaatacacatggggcgcgcaaaagcagctgccgaccgcaagccatttcgtcctgattcttgcgcgtacagcgaaggatatcaaatataatgcggactacatcaaacgtcatttaaaagaagtaaaacaaatgcctcaagacgtgtacgaaggctatttaagcaaaacagaagaattccagaaaaacgatttgcatttgcttgaaagtgacagaacattgtttgactgggcatcaaaacaaacctatatcgcgcttggcaacatgatgactgccgctgcgcaaatcggtgttgattcctgcccgatcgaaggcttccagtacgatcacattcaccgtattcttgaagaagaaggccttctggaaaacggaagcttcgatatttctgtgatggtggcattcggctaccgagtgagagaccctcgtccgaaaacaagatctgctgttgaagatgttgtgaagtgggtttaaaagaagaaagctgctcgcatagcgagcagctcttttttatgcctgattcgctctattctgttttctcctctgatgtaagtacattgccgttccgagtgcgctgatcagaaatccggccaacaggatcgagtacatggatgtggctgtgtccggaagcaggccgccagccggaccgtctgttcctgatccgcccgaaccgtttccaccagagccgttagtcggttgagtgccgggaggcgtatcatttcctccgtttccgtcagttggctgttttccgcctggtttgtcggagcctccgccatgattgccgtcatcaccgcctgtcggttgatctgacgggaatgccggcggtttgttgtttgaaccggaatttaagatcgtgtattcgctgaagtggtttgtatatcctgtcaccatatcatcatcgactgatccgtgacctgtctttgtgaaagctttcttttttctatcgacgtgataaatggcagggttatgggcttcttcaatatcaaacatgcgaagcgaaagctgtacgggctccttgaatgattttatttcttttcctttttgcttcactgtaaagtcatatacatctgacagtgacacatccaattctcccgtagacttgattccgattgcagtgtctgcggttttaaggttcgccattggcatcttcatgctgtaccagtagttgaacatcgtcaatgaaggatctgactctctttctttcaaaagtttgacctgatcttttttcactttaagattgataggcttctcttgagatccttcatgtattccataatagacaaatggcgtgttggcatttttagcataaatcgcaaatttgtcttcatcaagtgtccagctgccgtccttctgctttgtcggcaggaatacttctttgattcgtccttcaactttaggagagaccttgtttcctagttttttcagctgttcggtgaaaatctcataatcaacgtagccaaggtcttcaccatgggaggcttctgtaaagacagaatatccgtctcctccggcaccgacaaaattatttgttgccacgcggtaggtatcatccgtatttatagcaactttgtctccgttaggcgattcaattttcacttctaacacacggtgtccaggtttgttgtttaatgtaaaggtatattcgattccggccacctgagggaaagcgccgccgccattttccacattgcttaggccttgttcaagggcttctttaatttgttttccggttaaatcggccacgtaaagcgtattgccgaacggcatcacgttgagcacctcgccgagtgtgatatcacctttgtcaatgcctgctctgatgccgccgccatttgttatcgctattctggcgccggctgcttctttcgcttttgccagcataccgtccgcgatgaagtttccgagattcgtttctttcgtgcgcacatgctcacgctggccgtcaagcgccacatccgtgtagccgactttttcatttttcacgtcctctaattcatttttgaactgatcgagctcttgttttgcttctgggttttcttctgtatgttcatcaattggcagcacgctcagatttgatttatctgtttgcacaacgcctttttcatcaaacgcgacatcaacgcgccccaagaattggccgtattcttttgcctgcgccacgatcgtcggttcttcgttgttcacgacctccattttgtctacgagggtgtgagtgtgtccgccgatgatcaaatcaatgccttttacttttttggctagctcaagatcccggttatgtccgatgtgggttaaagcaataattttatttaccttttcttcttcttgaatcgctttgacggtgttttgtgctgtttcaaaggcatcattgaatacgatgcttttgcccgggcttgatgtggtggctgtatcttctgttgtcaggccgaatacggcgactttctccccgtcaacgtctaacagaatgtaagggtgaatgccggcctctttcttttcacctgccgtaaaggtttgcggctttttgacaaatgatttcagcttgggctcatttgacacatctacgtttgcactgacaatcggaaattccggcgcttcaaagtgatagcggttcgccggatcaacggttgcgctgtttccgcttagaaaatcagaaagcaccgtcgggcctttgtcaaattcatggtttccgaaggtcatggcgtcatagcccatcatgttcatcattttcagatcggccaaaccgttccatttagtaaaatacagatcgccggaaaacacatctcccgcatcaaggagaatattgtgatttgtttcgctgcgtacttcgttgattttcgtcattcgtctcgctgcatcatcgagatgggcgtgcgtatcattggtgtgcatgacggtcagatcccacagtccgtctttaggaggatctggatttgaatcatcatcgaattgcagcttatacacaccatagccttcattcgcagacttgcctacataagcgacatcgtctgctttatcggcaaatggcttggccaaaagcgaggattcaaacgtcagattcgtgccggaaacaggcgcgattgaccagttgttgtctgcttttggattgactgttttttgttcaataatgtaatccatcagcacctgcctattttcaactgcagagccgtggacaattttatcgctcgtcagatgagggaacccgccgcctccggacgcacgatagttattggtgactacgagaaattcctggcttgggctgatcggcttgccttcataggaaagattgatgatacgggatgaatccgcattgatcacttttccgttctcattgtatttagccggttttgtcacatcgacctgatatgtgacaccgtcaatcacgtcaaaattataggagcggaaattctcgttcagcaaggcctggtcgccgcctttagctggatcaatttgattgaattggcctgctgacatctccagccagtccttgacctcgctgcctgtcagcttgacgatttgaacagtattatcgtaaagatacaagtcaccgacatttttaatcgcaagatctccggctggaatgtttgtatagtaattggctccgtttctgccgcctgctttaaacggcgctccagcggataaaatcggcaggttcttgtactcggtatccttcatttctttttcagcgtaccacttttgcgcgtcagtcacgatctgaatggaaggatcatctttgacctgtgcaaagaagctgttaatatctgcttcggttttgccgactggctttcggacatactccagtgtgttttggtgtgtttgctgaatggtgtttgtaacggtttcgtttcttgatgtgacgttgccagcaatagattcaatacttcctttggaatctgctaccttccatgagccgtccgccttttcaagcttgaggtcaatcacgcctaaatatttgccccagctgcttggcatgacgacaggaatgccgttaattgttcccttttccacattgaactgagcaacacccgcatactcggcggaaggaaagagtccgtgctgatggcccgagataatcgcgtcaatgcctttcgttttggtggcaaggtcaaacacggcgttttctgcgcctgatgattgcgcctgcttttcaatgccggtgtgggcgagggcaataatgacatctgcgccttccgccttcattttcgggatcgtttcattggcggattctacgatatcctgcacctgaacttgcccctcgagattctttttgtcccatgtcatgatttgcggcgggacaaagcctatgtagccgacttttactttctgctcattaccgttttcatcaatgagggttttttcattaatcacatacggcgtataacggttttcgccgctagttgttttgacgttggcatttacaatcgggaaatcggctcctttgattgtgccgtcgagaaagtcgagcccgtagttgaattcatgattgccaagcgttccggcgtcgtatttcagcgcattcatgacgctgataatcggatgggttttcgtgccggagataatgtcgtctttttgatatttcaccgcgtattcacccagcggattcccttgaatcaagtcgccgttatccacaagcagggtgttagggttttgctcgcggtgcttttggatcaattgcgctgttctcgccagaccgaaatccgccgtttctttgtcgctgtagtaatcgtaatccatcatgttggcatgaatatcagtcgtagccaaaatactcagatgcacctgaggagccgcgctttcttctgcatgaatgggtggtgttgggaggattaggctaagtatcataattgggggcaaaagaatacggagaatgttttcgacgtgtgttcgtcttttctgtattctcaccagttctccacctttcaacgaaatttgtgttacagctcctattgtaagaatattttgtaactatttgtaggtgtttctttatgattattgtaaaagggagaaaaatgagtattatgtagcagtatcaaacgacaaatactgggcatttatgcttatcgtttgtcacaatcgcggaatgtttattttagtgtggctggggtagagtgttttatgtagacatataaagcgggaggttatgaatcatggggaaaaaaattgcagttgttttaacatattattttgaggacagcgagtacactgagcctgcgaaagcctttaaagaagcgggacatgaactgactgtcatcgaaaaagaaaaaggaaaaacagtaaaaggcaagcagggaacagcggaagtgacggttgacgcgtccattgacgacgtaaattcttcagactttgatgcgcttttgattcctggaggattttcaccagaccagcttcgcgctgacgatcgtttcgtccaatttacaaaagcgtttatgactgacaaaaagccggtatttgccatttgccacggcccgcagcttttaatcaatgcgaaagcgctcgacggccgaaaagcgacgggctatacgtccattcgtgttgacatggaaaacgccggtgccgacgttgtggacaaggaagtggttgtttgccaggatcaattggtcactagccgcacaccggacgatataccggcatttaaccgcgagtcattggcattgcttgagaaataagaaaaaacggacgctcttgggcgtccgtttttttgttgcttaggcttgagcacctgtcagtttcttgtacctgtaatacaagaaagcagctgcagccgttccgatgaccgcaatgccgaagtcgaatatgaaaatatgggcgatgccccccgcttttgcgataagccctgttgcaatcggcagcagaatcgatgcaagacttgaagcagtcgctacaattccggtaacggttccttttcgcttccagaaaagctctgtcattaacgtaatggtaatttgaaacacacccgcagttgaaaagcctaagaaaaaggcagtgatgtccagcacaactgggatatgaacggtcagcatgactgcgagcgtacataaagtaataataggatataagagcgttatgaagacaggtttgacccatctattcagcaaaacggctaataataaaacagatgccagagatcctatactataatagctcagcaattgtacagatgctgattcagctaaaccggctgccttttgcgcgtagctcgggagccagatttgagaaaccgtaaataaagccgtggatgtaaaaccgatgataatcagtgcggtgccttccttctgaaaaacgggttcagacaagaaaacgggagattcctgttggccgctattagttggtttcttatgttttttaggaaacgaaagcgttgataaataaataatattcaggagatagaccgctgccggcagataaaaagcaaatccgtaaaacatgctgtggtctgctaaaaatgtgatcaaaagcggcaaaagtgcggcccccacagacataaaggctttaaccaagacatttgccgaaccggaagcagacggaaagagctcggttagggccggatatgttccggcatccatggctgaattagcgactccggctaataaagcgaacacaaacgccagctcatagctcggtgataaaggaataccgactaaaaagacggccataattcccgcagaagcgacaacaagcggctttctgccgattttatctgatagaacgccggaaatgccgtatgtcagcagtttgccaaacccgatagcggcaatgacataactgatgccggtcggatcggtattccactgttttgttaatgaagacatattggatgcgagaatgatgttgaccatccccagaaagaagtagttgatatacattccggatgctgttttgatagatgtcgtttgcatgcttgtactccttcaaatcttattcgaacactttgctgttttggtttggggaaatgataaaaaagactcgccgagtttccggccagtctccattatttacgaagcgaggctaattcttgagcaatcgcctgcatttcacttgggctgaatgattcttttttcatcaccattctgtgaaggtacgtgaggtcttcaatcttctcatcactgaaatcctccgctttgattacgccgacgttcagcatgttcagcttttgggaaatctcttcaatcatttgagttaatgtttctgtatttgggctggacaaagggttccatcctttctatgcgcaatataggtatgttttattctaacagaattccatcagaaaaaaaccctattctaaaagcaggctgttcattccaaaaaagtgaagacatcagttgaaaagaaaatgaacatcctactaagatattcatgaaggtttctttttagagaaataggggcaaagaatagggaggttgcacatcatgataagcgtgttatttgtttgtttaggtaacatttgccggtctccgatggcggaagcgatttttagggacctggcagccaaaaaaggattagaggggaaaatcaaggcggactcagccggtattggcggctggcacatcggcaaccccccgcatgagggaacgcaggagatattgcgcagagaaggaatcagctttgatggcatgctggcgcgtcaagtcagcgaacaggatctggacgattttgattacatcattgcaatggatgcagaaaatatcggaagtctcagaagcatggcgggttttaaaaacacctcgcatatcaaaaggctcttggactatgttgaagattcagatctggctgacgtacccgatccttactacacagggaactttgaagaggtctgccaattaatcaaaacgggctgtgagcagttgcttgcatccattcaaaaagaaaaacaattgtgagtgaaaggagaatttgcatgaacaacgaacgtttaatgctgaaagggatatttctcggagctgcggcaggcgcggcgttatcactgctccataagccgacaagacaggcgtgcgggatgagatggctgacatgcaagcataaactttcactgtacaaaagcaacccagagctgttaaaaaacactgtcatcacaaaagtggatgaggccaaaaagctcgcccgaacgctttcaaaggaagtcgactttgtgaaccagcaggtgaaagagctgaagaaaacaacgccgcaagtgatggaactcgtgcaagaaacgaaagagcatttttcaaaaaaatgatcaaacatgcgaggtgagacgacatgagttttttgaaagagcttttcagcagatacacccttcatgaaggacaaagtaaatcagcggagctggcgtatttttttctattgtcactgtttccgtttttgatttttatgctgacgctcaccgcgtatcttccgctttctaccgatgatgttttaggagtcatagaacaatatgctcccgccagtgcgatgtcactcgttgaatccattacccatcaaaccttaaataatcgaaatggcggtttgctgtcattcgggattatcgccgcattatggtctgcgtctaatggaatgaatgcgatcgtccggtcgctgaaccacgcgtatgatgtggaagaaaaccgctcttttatcattgttcgtctaacctcgatttttttgacgattgccatggtatttacgattttagtggctttgcttctgccggtatttggccgggagattggaaggctcgcttctgactttgtcggcgcgtcggatctgtttttatccgtctgggccgccattcgctggggtgtcagcccgcttgtgcttttgattgttttttccgcgctgtatgtgattgcgccgaacaaaaagctgtctctccggtttgtcatgccgggtgcggtctttgcgactatcggctggatcattgtcagcacattgttttcattttacgtcagcacgtttgcgaactatagcgccacttacgggagcatcgggggaatcatcgttctgatgatttggttttacttgagcggcattttaattatcctaggcggagaaatcaacgctcttttacataaacgtaaaaagcttcctgatgaaaatccctaccattagcgcaccctataaacgaacttcggttcaaaaagaagtcggggggatatcgtgatgaccaagcatacgaaaaaaggcggaagccataacaaacaaaactcgaaaagcaaatcgagccataaaacaagcggaagcgccaacggacaaaacggctaccattagcataaaagcctcctgacatgatgtcgggaggctttttgattaagaagatgaagaataggtttcagccggtgaccagcttttcggtttgcccagcacaagggccagccacacagagctaagcgtgagagtaatgaagtagaacaagtttgcgctttcaaatgtctgcatataccagccgccggcaactgggccgaggatgctaccgagactgaatgtaatgccgcaaagcaggtttcccgccggcaggaggtgaggcggaagaaggtctgtcatatagctgatgccaagtgtaaaggttgatccgactgccattcctgcaataaaaaagcagccgccgatcacgtagggcgaaggaaatacaccggcgatgaaaaagcaaagagccccagtcagtaaaatcaccagcagcacattccgcctgccgtatttatcgctgaggatgccgagcggaaactgaaagataatgcttccaatcgcaaatgcgggaaggatgatcgctactgcgtctactgatatccccaaacggagcgcgtacaccggaaagcttccgttcagcgccgtttccagaaagccatagccaaatgtaggcataaaggcaacccacccaaacagcatggcctgataaaatcgcctgaaactattgtctgatttggtttcatgaggactggtttccgggtatgcattttgtagaaagaaaacaaaaagccacgcaaacagactgatgcagccggacacgataaaaggaagcgacggactcagcttgacaagcggcaccatgaacgggcctgcggcaaagccaaggccaaaggaaagcccataaatagacaggtttcttccgcgattttgttttgatgacatggaggtcacccacgtttgcgtagaaaagtgaagcatgtggtcgccgattccaatgaacaggcgaagcaggaaccagacccaaactgactgaagccaaataaatccgaataagcttaaaatgacaatgcttccgcccatgacgatcagcggcttgaacccgagctttctgagcggtgcttccataaacggcgaagccaaaagcacaccgatatacagcccggtcgcgtgcaggccgttgatagcagcggattctccatttgtttcaaaaatgattgaaatgacaggcagcagcatgccttgtgaaaacccggaaatggaaacgagcaagacaaggataaagaaatgaaatcgtgacatcgtgtcagttctccttatatggaatctatgttgatcgtacaacgttttccaaaagcaggcaacctgaaaaaagcctatatcacgctatacatttgccctcgtgtaatcatgaaggtttttgtgaagaataaaaataaaacaagtcataaaaaaggagctatttcaccatgaatcgtatcttttttattttagtggcggccggtgttccgctttctgtgattggcagtttgatgcattggccttccgcggttctatttgcagtttattgcgtgacgattatcgcgcttgcaagctatatggggagggcgacagaatcactgtccatcattgcaggaccgcgtatcggcggtttgttgaatgcaaccttcgggaatgcggtggagctgattatttccctttttgcattaaaagaaggcctgacaggaatcgtgcttgcctctttaaccggttcagtgctggggaacctgttgctggtagcgggcctatcgttttttgtcggcggtttaaaatataagcggcaggaatttaatatccatgatgcccgccataactccgggcttctgatttttgccatcattgtcgcctttgtgattccggaggtattctctgttggtatgggaaacgccagcaagctcaatttaagcatcggcatcagcatcattatgattctgttatatgtggcggcgctgtactttaaacttgtcacgcatcggggcgtttatcagccgaataatgccgctcagactgaagaagaggaagagccagaatggtcagggaaggttgcgacgattgtcttgtttgcggcaacgattgtggttgcatacatatccgaaaacctggtccatacctttcactcggtggctgaacagttcgggtggagcgagctgtttattggggtcatcatcgtggcgattgtaggaaatgcggcggagcatgcgtcagcgattattatggccttcaaaaataaaatggacattgctgttgaaattgcagtaggctctacgctgcagatcgctatgtttgtcgcaccggttctcgtcatctgttctatcttttttccgacaagcatgccgcttgtatttacattgcctgagctcgtcgcgatggtatcagcggttctcttgatgatcgcgatttcgaatgacggggattccaactggtttgaaggggcgacactgcttgctgcatatgtcattatggcgatcggctttttccttctttaacctgaaaaaatgatggataacaacaaagcgggatgaaaagactaagggaaaatgccatagaaagagtgatatgatgaaaaagctatttcattccacacttattgtgttgttattctttagttttttcggcgttcagcccatccacgcgaaaaagcagtttaaggttcctaattctgtcgcaagcatttcaaaggaaaacacgtatccgaatgcttcacaggatcagccaatgcttcagccgagcaagctggcaaaggaattgctcgatcattctgaggtaaagattgaaaatccgcatctcatcaaaatgctgaatgaatccaacatatccggcacaccgcttgcagtagggtaccgggcgacaatatttctcgggaaatgggcgctcggctatgaatcaaatgaaacagtcgcaaactgggaatataaaaaaatcaatacaaaccgtgcggataaccgcggcgggaaagaaacggctgaaatgcattatgcccaggaacagcagtacagagtgaagggcggcttgacagctaaagttccaaatgctgaagatgtcaaaagcatgatgatgcaaaaagcaatgaagaaaacgaacctcccgcttgcatttgagacggtcatcggggctggcacaaaacgggatcagatttataaagtcgctcctaaaaaaatcggttatctacatgcatatgcaccggctgtgaatgaaaaaggaaaagtgacttacggagaagtgtacttagtgctgaaaggaaataaacgaaaactcgtcgtgaaaaatgtcacgtcacagggaatcggcgcgtggattccggttcaagatcatgtcacgtttggctttcagctttcctcactgccaagataaataaaaaactgattccaactcggaatcagtttttttgtttattgggttctctcgattcggaccgcttcctcaagcatttgcacattgttttggtagagctggcgaacgagaacccgtcttactgcaaggctggcactgaaataatcatcatctttcaccatgcctttaaccgtaaattcgacgccgcgattgattttattcaatgcggtgatgccgtggatttgaaacggttctgtcggattgccgaattcatcccgcttcaatgaatcacgaagctcttcattcagcatgtcacatgcctcttccaacacgctgtacacgcggtccggatcttctttaaagctgataagaaaggattcggtaatccgcataaaatcaatattatagttctctatttgtctgacctcgccgttgctgatggtgagcagcttcccgctccattcccggatttgcagcgagcggaggccgatttcctccactgtcccgttgaacaagttgttgacggtgacataatcgcctttgtgcagctggcgttcatatattaagaatacaccagccagcacatctttgatcagcgattgggcgccaaaaccgatcacgatacctgctacgcccgccccggccaatatcttgccgaaatcatgcacaaataaagaaataacgtaaaagataaaaccaattgttgccgtatactgggtgacagaacggacaaggctttcaatcgttttttcctttttttcttcaataaagtccgtccgtttaaaaaatagctgtaccagccggttgatgataaagacaccgatccaaaggataacggcaacgaggagaatatcgacgattttattttgaaaaatctccgtaagtgtttctttcatccgcatctaactcctggcttgacgttttgtgaagtctgtatcctgataataactgtttttgacaagaacattcggtccgaggcaccggacattcgggcagtggcaactcagttctttcgcaagcttggtctctctccacttttcataggcggaagggaggctgtccgtctgaatgttgccaagcggcggggtatcaccgaaatcggtcacgataatgtttccgtcgaaaatgttcacattcaggcgggatcggccgtcagggtcatttcgcactgtgacgtttttcgccgcgcgaagccggcgaagcagcttttggtcgtcttcgtccggactgcaggcataaaacggcagcgttccgaacagcatccacgtattttcatcacgaatatccagcaagcggtgaatggcctgtctcatctctttcaggctgagggattcaagagcgcttgcgaaatcgcttggatacattgggtggacctcgtgacgctgacatttcatatcttctgtgatttggcggtgaatatgctcaatatgcggaagtgttcgtttgttcagcatcgtttccgcagataccattactccggcatccacgagcgtgcggctgttttcgatcattttttcaaaatagcgcgcgcgctgttcgaaggtcggttttctgtccatcatggcaaagccgatttcagcaaaatcttcaactgttccccagttatgtgaaatatgtagcacatcgagatacggaatgatccattcgtaccgctcgatgtcgagggtcagatttgaattaatttgtgtccgcacaccccgttcatgggcatatttcaataaaggaacaacatattcttttactgatttcaacgaaagcatcggctctccgcctgtgatgctgatggatctgaggcgcgggatttcctccagccgttttaacagaagatctattggcagagcattcgggtctttaggctgcaatgtatagcctacagcacaatgctcgcatctcatattgcacagtgtcgttgttgtgaattcaacgtttgtcagctgcatgtctccgtattggtcaacatccatataggcttcccaagggtcaaactcgggcgtaatcggacgcagcttcgtgttttgtgtcatgactatctaactcctttataaatgggcatactaacgctgccaacagttaattttagacctgatttgccaagatcgcaagtagcgcggcgattgaaaaacggcaaaaaatgagctaccataataaaaaatgaatggaggaacagaatggggaacgccgtaaacaataaagatcagcagattgattatttaaagaacagacttgacatgtttatgaacgtcatcgattcattagaccctgaagcaaccgacgttgaagatatagacaggcttatcagcatgcttgatgacctggaagccaaatacgaacgttttaaaaaagattgggaataaaaccgcgtgcccgccgcggtttttttattggcataaagcaacagtataaaacaaagtctctatctgtaaaataagaaaaaatgcagaaggagcgctggccatgaagtggatgtgttcaatatgctgcgccgccgtattgcttgccggaggtgcagcacaggcggaagcggtgccgaatgagccgattaattggggctttaaacgaagtgtcaatcatcagccgccagatgccgggaagcagctgaacagtttaattgaaaaatatgacgcgttttatttagggaatacaaaggaaaaaacgatttacttaacgtttgataacggatatgaaaatggctatacgccaaaagtgcttgatgtcttaaaaaaacatcgcgtaacaggaacgttttttgtcaccgggcatttcgtaaaggaccagcctcagctgatcaaacgaatgtcagatgagggccatattatcggcaatcattcctttcaccatccggatttaacgacaaaaacagctgatcagattcaggatgaacttgattcagtcaacgaagaggtttataaaattacgggaaagcaggacaacctgtatttgcgtccgccgcgcggcgtgttcagtgagtacgtactgaaagaaacgaaacgcctcggctatcaaaccgttttctggtcggtcgcttttgttgattggaaaatcaacaaccaaaagggaaagaaatatgcctacgatcatatgatcaagcaggcgcacccgggagccatttacctgcttcacaccgtatcgagggacaatgcagaagcgctggatgacgcgattacagatctgaaaaaacagggctacacttttaaaagcattgatgatctgatgtttgagaaagaaatgaggctgccgtctttgtaaaagagaaagacctctccttaaacggagaggcttttctttattttatacatttaatcagtgcggcccagtccagatccccgaagcctttctcaatcccgctttcaaaatggctcttggccagctcggcaagaggaagatttgcagaaacccgttttgcggcggcgagtgccaggttggtatccttcagccctaaagacattttgaagccggccggctcaaatttctgctcggccataatggttccgtaattttgatagactggagaaccaaagagcgcgctggcgatttctaaaaattgtttttgttctaagccgtatttctccatcattaaaaaggattcagataacgcctccagcatggacacaagcaagaaattaatgctgattttggctgcatttgccgtcttgctttcttcgccgacgtcaaatatctgctggctcaggctgtcgagcagaggcttggcagcttgctttgcttccgccggtccggctgttatgatacggagcgcggctttggctgcggcatccggtctgccaaggacaggagcggcgagaaaaaattgtcctttctctgcatgagccgctgcgagcttttctgagaactcaacactgattgtgctcatcgagatgtgtatgccgttctctgctaatccttcaagcagcccgtcttctccgaatgtcacggtgctgacagaatcatcatctgcaagcattgtgatgacaatatcagcggactttgccgccagccgcggcgtatcagctgcctgtgcgccttctgtgacaaggtcttctgtcttttgtttcgtccggttatagacagtcaattcgtagcctgcttgaagaacatttcgggcaatgggctgtcccatattgccgagtccgatgacagcaattttcaatctaatcactccctgaatattttttccattataaacaatatgaacagaatatgcatagcgatcggcttacaacaaaaaagaacagctgctcgctgtcctcatttaaaaatattgaaccatcctttatgtacaaaccaaatcagcattccaatcacaagcgcggccatcaggccaagtacagcgaaatatccgtatttccaatgcagctccggcataaagtcgaagttcataccgtatacaccggcaataaaggtgagcgggatgaaaatggttgatacgatcgtcagtgtcatcataatcgcattcatccggtttgagtttagcgtcacgtagctgtcacgcaagtcggacgtcatgtcacggttggattccacaatttcagacaactttaacaaatgatcatatatgtcgctgaaataggctttcgtttcccgctgctctttcacatggtcaaggcttaaaatccggtagagcaaatcacgcatcgggataatcgtccgtctcaaatgcaataggtctgttctgagatcaaacacctcgttcatcagcgttccatacgttttgtggggacggctttcttcaatttcattcagccggtcttcaattttatacacgagaggaaaatattcatcaacaagctgatccatgatcatataagaaatatgcccgggcccttttttcaatatgtccggtgaagcatacaaacgctcccggactttagcgataccgggcgtttcgtgtaaatgaaaggtgacgacaaatttttcgccttgaaagatatcgacttcctccgtctcaagtgtttccttattcagcgcatgaatcacgtaaaaacgatagccgtcataatggtcaagctttggccgctgcatatgctggaagcaatcctcaatggcaagcgggtgaaaatgaaaaaaatctctcaataacgccgtttccgtatcctccgggccgtaaaaatcaacccagtaccatgcaatatcaggctgttccactcgttcgatcggtatatttttcagcagctgatgctctgttgtgattgcggtaatgttgatcataaacaaccctccacctgccattatatcatgcggtctttatgagaaaagtatacggtactctctgcctaattccagcggcatgttatactgaacaaaaacggaaaaaagggtggatctcatgtggaaggaaaaagtatctgtcacgcctccgtatcattttgaccgcgtgctggacaggctgtctttagaccccctcaatgctgttgatcgagaggcgagggaagtccgtgtgccaatcagaaatcaagcgggggacgtatgtattgtaaaggtacaggcgttaggccatgcgggcgagcctgagttcctcgtcagcggggaaacggatcagggagaaatgatgaaggaaatcaagcggatttttcaatgggaaaatcatttgcagcacgttctggatcatttttcaaaaacgagcctgtccgccatttttgaagagcatgccgggacgccgcttgttctggactacagcgtgtacaactgcatgatgaaatgcattatccaccagcagcttaatctttccttcgcttacacgctaacagaacggtttgttcatgcgtttggcgagcagaaggatggcgtgtggtgctatccaaagccggaaacgattgcggaactcgattatcaggatctgcgtgatctgcaattcagcatgagaaaagcggaatacaccattgatacatcaaggatgatcgcagaaggcacactcagcttgtcagagctgccgcatatggcggatgaagacattatgaagaaactgatcaaaatcaggggtatcggcccgtggaccgtgcaaaacgtcctcatgttcggacttggccgtcccaatttattcccgcttgccgatatcggcctccagaatgccatcaaacgccactttcagctggacgataagccggcaaaggatgtcatgctggcgatgagcaaggagtgggagccttatttaagctatgcgtctttgtatttgtggaggagtatagaataattcgtctgacaatgaaggaaatcctgcaaacgtgttatactagaaagatgtgaaaaaaccatttcactttctgccatccgcagaaagcttcatatagaaacggagagaacaacgtgaaccaacaaaagaaacaggcgcccgtcgaactgaaggtcggacaaacttttccgctgacgattaagcgtctcggcattaacggagaaggtgttggctattttaagaaaaaagtcgtcttcgtgcccggcgcgcttcctggcgaagaagttgttgtgcaggccacaaaggtccagccgaagttttcggagggccgcattaagaaaatccgcaaggcatctgagcaccgggtggcaccgccttgccctgtttatgaacaatgcggcggctgtcagcttcagcaccttgcatacagccagcagcttcgggaaaaacgtgatatcgtcattcagtctcttgaacgccatacgaagtttaaagttgaaaacatggaaatcaaagaaacgattggcatggacaacccgtggaattaccgcaataaaagccaattccagatcgggcgctcgcaaagcggcagcatcatcgccggcttatacggccttgattctcatgatatcgtgccgattaaagactgtatcgttcagcatccggcaacgaacaaaacaacaggcatcgtccgccgcattttagaggacttcaatgtgtctgtttataatgaaagaaaacgaaaaggcgacgttcgcacgatcgtgacgagagtcggctttgaaacaggcgaagtgcaggtcgtgcttgtaaccgcaaaagaaacgcttccgcacaaggaagaaatcgtcaaagcgattcaaaagcgattgccagaggtcaaatccattattcagaatgtaaacggggcgaaaacctcagtgatttttggtgagaaaacaaaacagctcgccggaaaaacagtgattcaagaagtgctcggcgacgtatcttttgaattgagcgcccgcgctttcttccagctcaatccggaacagaccgtcaagctgtatgatgaagtgaaaaaagcggcgcagctgaccggaaaagaaaaagtcgttgatgcgtattgcggcgtcggcactatcggcatgtgggttgcggacggagcgaaggaagtccgcggcatggacgtcatcaaggaatcaattgacgatgctaagaaaaacgccaaaaaacacggcatggcaaatgccacatacgtaacaggaacagccgagcactggctcccgaaatggacgaaagaaggcttccgcccggacgtcgtcattgtagacccgccaagaacgggctgtgacagcacgttcttggacacgatcaaaaaagtcaaaccgaaacgctttgtctacgtttcctgcaatccatccacgcttgcgaaagatttgcagacgctgtcgaaggactatcgcgtggactatattcagcctgtcgatatgtttccgcagacggcgcatgttgaagcagtggcgaggcttgtattaaaatcgtctaactaaaaagaacatttcccagtcataaaatagttttcctaataagacctggatttcggtaaaataaacaattccgatttccgggtctttttcgtgcgcagctcttgtcctaacggtctgttctcaattttatcttccttcttttcgcggagatctttattttaactggcgaaaagaattgaaaaaacgtgttgaaaagcaggtgaaaaaaagcgttatttaaccggaaaaatatcctcccagtatgtttaaaatacatgagtagaatgatgtaaaatcatagatgtattttcataatttgtaaaattatatattgacttgcagttattacgtgtgaaatattgatgataggaatataaggaaagtatggcgtatatcatttcaagagtcattcgatgtaaaaagttgaaacattgtaataaatgaaagaggtgaaaatgatggccaaccccattttaaaatgcataacgtatgagcactacaacaattaaataatagtgccgagacgataacaactattacagtaatacctacaatggttatatccttgcgacaatcatgcttcataatataatgattttagattgacacttggctaaaaagtattgcagagaaggaaatggataattaaatggataaagtatataaaagaagttggtttcaaacatttttggcatttttagtatctcagctttattttaattttgtagaattaacgggatggggtcctaagtatagagaaatgaatggattcccagcaaacatagttgaactagatttctttcaaacatatctttcattctatgataatccatggtttaatattattactgttttcttgggagttttcactattatacaaataattacagggataacaaaggatattcgaaattaaagcaataacttctgatgccttatttaatgatgaaagaaaatgtacactttcttaattatcttatgagtgaagactgcgacacttagtcagcagtctattttatggttctggatcaggattaccgaattataaccctatacaaatatatagtaggttgccacttgctgcgttggttattttctaaatcatgagcaaatcccaaatgattcagattgaagttcttgaattcttttaaataagggtttattttctcttctcatcctctttactccatgtgattcacaagtggtagcagcttaagtaggttttttcattctcttgagtactcagttataccacccccaactcaatttgctttatctctattagtttttccgcaaatatgatatagagatacggatatggtgtagtgttaaatatcttatcttcaataacagggcaattattttgcgttggtaatatggagaactcatatgatattctatttaggttggaatcctttttatccaaaaagttcaaaagcaaggccactaagaaagacgaaggtcagcgccagttaaccagaatataaaaaatagggtagataatcatcccacgtgaaatcttcaaaatttactatagattgataagaaatgctttcgcatgcgataagtgtaaaagaagcatggtcagtttttaatttgggataaaggttcagccgtatcccataatgaaaggatttgatttttgttatgacagaaaatttctggcgtgaattaccacggccgttttttgtactggcaccaatggaagatgtgacagatgttgttttccggcatgtagtaagtgaagcaggcagaccggatgtgttttttacagagttcacaaactcagagagctattgccacccggatgggaaggatagcgtgcgcggccgtttgacttttacagaggatgaacagccaattgtggcccatatatggggagataagcctgaaaacttccgtaaaatgagtattggcatggcagagttaggatttaaaggactagatatcaatatgggctgccctgtgcctaatgtggcggggaatggaaagggaagcggccttatttgccgtcctgcagttgcggcagaattaatacaagctgcaaaagcagggggattgcctgtaagcgtgaagacaagacttggatacacggatgtggatgaatggcgcgagtggctgacacacattttgaaacaggatattgcgaatctttctattcatctgcgtacaagggcagaaatgagcaaagtagatgcgcattgggagctcatcccagagattaagaaacttcgtgacgaggtggcaccagatacattgctaacaataaacggggatattcctgaccgtcaaactggcttgaaacttgctgaacaatacggcgtcgatggaattatgatagggcgcggtatttttacaaatcctttcgcttttgaaaaggagccgaaagagcatagcagcaaggaattgcttgatctcttaaggctgcatctggatctccatgatgaatattcaaaagaagaagcccgtccatacaagcctcttcctcgctttttcaagatttatctccgcggattccgaggggcaagtgaattaagaaatcaatgcatgaacacaaagtcaacagatgaagtgcgtgcattgctcgacgactttgagagaaagtatcttgatgggatagagtaacagcagtgcttgattcaaaaaaggctaacaaaataaagggatttttacacaattcttgactaaaataaacctggattttcggtaaatccgggtcttttttgtacgcagcttttactcagcctgtcttttctctaatttattgtaagaaaataatggtatatttagtggagatatcatataaagggggagaggaaaatgaaacggctatgcatcatcccctgcggcaagaaaaaaatctgggatgtccagcctgatgccgggccggtaagagcagaggacgcttatctcagcccgtttcatcaggcgtgcgagcggtatgcaaaaacatttttcgatgagtgggtgattttgtcggcgaagcacgggttcctccgccctgatgatctcgtttcgggaaattacgatgtcacttttggcaccggtcatccggaaatcatgacagcggacgagctgcgccgtcaatttcacgaaaaaggcttttctgatatcgaagagctagtcatgcttggcggaaaaaaatatcgaagcgttctaaacgccgtcatcggagaacaccagcatatcagctggccgctatcatcatacaaaggcataggctatatgctccaagcgctgaaccgggctgttgaagaaaagcatgaactgtagcacgtacatatgaggaaaagagtgggaacatgaaaaaacttgtgtttggcttgcttgccattgtgttattcggatgcggactatatatctatcatgtatggttcggtgatccattttcgaaaaatgctgcagaacagaagctagtgtcttatgtgaaacaaacctatcctaagaaagaaatcaagatcacgaatggggtatataacgctaaaacgtctgaatatgtatttgaagcaacctcccaatctcatcgctacccaatgtgtacgaagggatttctgcatcctaaagtaacgtgcgatggaattgaagaagcgtataccgaatcagtagcaaaacatgtaaatgaagaagcaacgaaggcaatcgaagcagatctgaaaaaagcggttcctcgatttataaaagctgatgctgctttgagtatcgaaaacggacagttcacgttagatacaaaatggaacaaaaagctggctgaaaaagcgcctatgagcatgacgattcagttagacgccagcgggttatcaaaaacagatgccgcaaagatggcggaaacggtcagaaaaacgcttaatgaaaagggatatacatactcaaacggcacgatagactgtatgcagaaggacggggacggcggtattggatatgtcaaatattcaattgattttctttcaaaagcagctattcagtcaaacgatgcagaggaactaggaagttaaaaagatttccaaggaaataaatacgtcgatcattgtcaaaggccgggtgatatccggtcttttttttgcatgctgtaaaacgagacaaatgaatcagtttgagacaaaacgagacacacgtctcaaactgtctccaaagtgaagatgagaagactgattttacgggctcaaaagactggcacacttcttgcatttataatggtgaaccctaaatagaaggaggcgcacaaaatgaaattgttaaaacgagaaggcttgtcattaactgaggaaaaagcgctgtggatgtaccaaaagatgctggagatcaggggctttgaagacaaagtgcatgaactgttcgcccagggagtgcttcccggattcgttcatttatatgccggtgaggaagccgtggctgtaggggtgtgcgctcatttacatgatggcgacagcattacaagcacccacaggggacatggacattgtatcgccaaaggctgtgacctggacggcatgatggcggaaattttcgggaaagcgaccggattgtgcaaaggcaagggcggttctatgcacattgcggatcttgataaaggcatgttaggcgcaaatggaatcgtcgggggcggctttacgctcgcatgcggatcagcgctcacggctaaatataaacagactaaaaatgtaagcgtttgctttttcggggacggggcaaataaccaaggtaccttccacgaagggctgaatttagcggctgtatggaaccttcctgtcgtatttgttgctgaaaacaacggctatggcgaagctaccccatttgagtacgcatcagcctgtgattcaatcgccgatcgggcggctgcttataacatgccgggggttacagttgacggcaaagatattttagcagtttaccaggcagccgaggaagcgatagaaagagcaagaaacggcggcggcccgtctttgattgaatgtatgacctacagaaactacggccatttcgaaggagatgcccaaacctataaaacgaaggatgaaagagttgagcaccttgaagaaaaagatgccattcaaggttttaaaaactaccttttaaaagaaacagatgctaataagctgtcagacattgaacagcgtgtcagcgaatcgattgaaaaagccgtctcgttcagcgaagacagcccatatccaaaagattcggagctgctgacagatgtgtatgtgtcatatgaaaaaggaggaatgtaagagatggcgagagtcataagcatgtcagacgcgatcaatgaagcaatgaagcttgcgatgagaaaagacgaaaatgtgcttttgatcggtgaggatgtcgccgggggagcggcggtcgatcatttgcaggatgatgaagcatggggcggtgtattaggggtcacaaagggactcgtacaggaattcgggcgtacaagagtgctggacactccgatttctgaggcaggctatatgggagcggctatggctgcggcatcaaccggtttgagaccgattgccgagctgatgtttaacgattttatcggcacgtgctttgatcaggtgatcaaccaaggggcgaaattccgttatatgttcggcggaaaagcgcaagtgccgattaccgtccgcaccacatacggagcagggttccgggccgctgcccagcattcacaatcgctgtatggccttttcacgagcatccctggactgaagacagttgttccatccaatccgtatgatgccaaaggtcttttgcttgcagcaatagaagataatgatccggtgtttttctttgaagacaaaacgtcctacaacatgaagggcgaggtgccggaagattattatacaattcccctcggaaaagcggatatcaaacgcgaaggcaatgatgttacgctctttgcagtcggcaagcaggtcaatactgcgcttgaagcggctgcacagctttcagagaggggcatcgaagccgaggtccttgatccccgcagtctgtctcctctggatgaggatgcgattttcacatcgttagaaaaaacaaaccggctgatcatcattgatgaagccaatccgcgatgcagcattgccacggatattgctgcgcttgtcgctgacaagggctttgatttgcttgatgcgccgattaaacggattacagcgccgcatacaccggttccgttttcaccagtgcttgaagatcaatatttgccgacaccagataaaattgtcagcgtcacgcttgaattgcttggcgagccggcattgaattaaaggggggacacaaatggcggtaaaagtagtgatgccaaaattgggaatggccatgaaacaaggggaagtatcgatatggaataaaaaagtaggcgacccggttgaaaagggagaaagcattgccagcattcaatcggagaaaattgaaatggagatcgaagcgcctgaaaaaggaacgctgatcgatatcaaagtgaaagagggagaagaggttccgcccggcacagctatctgctatatcggggacgccaatgagtcggtgcaggaagaggcgggggcgcctgttgctgaagacaatatgccgcaagccgtccagcccgtcaaacaagaaaacaaacccgcagcctccaaaaaagatcgaatgaaaatatctccagtcgccaggaaaatagcagaaaaagcaggattagacctaaaacaactgaaaggaactggaccaggcggacgaatcgtgaaggatgacgtaacaaaggctcttgctgaacagaaaaaagatcaagcaaagcctgtttcggagcagaaagcgcaggaaatcccggtgacaggcatgagaaaggtcatcgctgcccgaatgcaggaaagcctggcaaacagcgcgcagctgacgatcacgatgaaagctgatatcaccaagcttgccactcttcaaaaacagctttcaccaactgcggaagagagatacggcacaaaactgacgatcactcattttgtctcaagagccgccgttctcgctctgcaagctcaccctgtgctgaacagcttttatcaaaatgagcgcatcatcacacatccccatgtgcaccttggtatggctgtagccttggaaaatggcttagtggtgcctgtcatccgccatgctgaaaagctatcgctgattgaactggctcaatccatctcagaaaatgccaaaaaagcacgcgagggacgtgcgggaagcgaagaactgcaaggatctactttctccattacaaaccttggcgcgtttggagttgagcatttcacaccgatactaaatccgccggaaacaggcattctcggcatcggagcaagctatgacacaccggtgtatcaaggggaggagatcgtcagaagcacgatcctgccactcagcctgacatttgatcacagagcgtgtgacggcgcccctgccgctgcattcctgaaggcgatgaaaacatatttggaagaacccgcagcattaattttataggaaaagcaggtgaaaacgacatgacattagccattatcggcggcggacctgcaggctatgcggctgcggtttccgcggcacagcagggcagaaacgtgctgctcattgacaaaggcaagcttggggggacctgcctgaatgaaggctgcatcccgacaaagtctttgttagaaagcgcaaacgttcttgataaaatcaagcatgccgacagctttggaatcgaacttccggcaggtgcgatatcagtcgattggagtaaaatgcaaagccgaaaacaacaggttgtcagtcagcttgtccaaggcgttcagtacctaatgaagaaaaatcaaatacaggttgtaaagggaacagcctcctttctttctgaaagaaagctcttgatcgaaggagaaaacggaaaagaaatcagagaggcggaccaagtattgattgcctccgggtcagagccaatcgagctgccttttgccccatttgacggcgaatggatcctcgacagcaaagacgcgctttctctttccgagattccgtcttcactagtcattgtcggcggcggtgtcatcgggtgtgagtatgcagggctgttcgccagattgggatcgcaggtgaccatcattgaaacagcggaccggctgatcccggctgaagatgaagatattgcccgtctctttcaggagaaacttgaggaagacggtgtcgaagtgcatacttcatccagattagggcgggtggatcaaacggccaaaacggcaatatggaaaagcggtcagcgagagtttaaaacgaaggccgattatgtgctggtggcgatcggcagaaaaccccgtcttgacggattgcagctggaacaggccggagttgatttttctccaaagggcattccggtgaatgggcacatgcagacgaacgtgcctcatatttacgcgtgcggagatgctatagggggcattcagctcgcgcatgccgctttccatgagggcatcatcgctgcttctcatgcttccggaagggatgtcaaaatcaatgagaaacatgtgccgcgctgcatctatacgtccccggaaatcgcgtgtatcggaatgacagaacgacaggcaagaagcatatacggggatgtgaagatcggcgaattttcattttccgcaaacggcaaggcgctcattaaacagcaagcggaaggaaaggtcaaaatcatggctgaaccggaattcggcgaaatcgtgggtgtctcgatgattggcccggatgtaaccgagctcatcggccaagcggcagcgatcatgaatggtgagatgacggcagatatggcggagcattttatcgccgcccatccgactttatcggaaacattgcatgaggcgctgttaagcacgatcggccttgcggtacatgcataataaaggaaaaagcaggcgcatggatataaggcgcctgcttttttattgttgaaagcgctttatttttcccctacaatagatgaaaacggcgtgtaagggaggagcgatcaaggaaatgaattcggtcccaaacgatttgcaaacctggaaacgttttgtgaaagacggtgtgcttgacgaagcccgattaagaaaacggattgcagagtcatggcatcgctgcaaaaaagctgaggtcaatccttatttagaaaaaggcccgaaggttttacagcaaacggagctggatcagcagtcaaaaaaacattcattcttcttgacgaccgcaaagccttacctcgaaaaactgctgcctgccataaaagaaatggaaatgatggcgctgttaattgattcagacggtgttgttctggcattggacggccatccgcgcgcgctctatgaagccaaacgcatcaatttcgtcgaaggggcatgctggacagaaacggctgtcggaacaaatgcgattggcacggcgctccacatcagcgagccggttgcaatacaaggatcagagcattactctatcgcttcccatctttggaactgttcagctgctccgattcaccatgaggatggcagccttgcgggtgtaattgacatatcatgcccggcggcaggcgcgcatcctcatatgcttggtattgccacggcgattgcctatgccgctgaacgggaactcgcagctaaaagccgtgagaaagagctggagctgatcagccgttttggggagagagctgcatccagtgtgccgatggtgctctgtaataccaagcagcacatcatcagtgcgagcatgccgattcgaacctcaatgccggattggcagggccggcacctgtacgagttgaaggaacggggctattcaatcgaaaatgctgtcaccataggagatggcggcacttgtttttatctttcggaacaaaagaaaaagaaggcgtttcgattcaatggagtgatcgggcaaagcggccgatcgcaagcgatgctgatgcaccttgaacgagcagctgcgacggatgcatcggtctgtttgtcgggtgaaacgggtacggggaaggaggtcgcggctcgcgcgcttcatgagaacagtgagagacggcacggtccgtttgttgctgtcaattgcggagcgattccgtctgatttgattgaaagcgaactgttcggatatgcagagggcgcttttacgggagcgaaacgaaatggctataaaggcgcctttcaaaaagcgaatcaaggcacattatttttagatgaaatcggagaaatttcccactcgatgcaggttgcacttttacgggtgcttcaggaacgcaagataacgccaatcggcgggacgaaagaaattccggttgatatcagagttattgccgccacacattgtgatttacgcgagcttgccgaaaacggaaaaatcagagaggacttgttttaccgtcttcatgtctatccaattgaactccctccattacgcgatcgcaccgaggatatcccggatctctttgagtactacaaacagaagaatcattggccaggcgatcttccttctgatttttgtaatgtgctgaagcaatggaagtggccggggaatatccgcgagctgtttaatgtgtttgaacgtctttctatcagatttccggacggccggctgagagatgaatcgcttcccgctttactggaagccgctggattgccggccagctctgcagaaaaaaagccggctgctgccggcgtgcttacttttcgtgagcaaatccaaaaggatatgatgatcaaagcgcttgaatctgcaaaaggaaacgtctctcaagccgcaaaaatcagcgggatcccccgaagcactttctacaaacgcctgaaaaaattcaacttgtccgctgaatcataaagcatacttccttcaggaaatggaaacgttatgtattgaaggagggtgttacgatgaatattcaaagggcgaaagaaattgtagaatctcccgacatgaagaaagtaacatataacggcgttcctatttacattcagcacgtaaatgaagaaactggaacagcaagaatttatccgcttgacgaaccgcaagaggagcatgaagtgcagctgaacagcttaaaagaggattaaacaaaaatggcccgcttcataagcaggccattttgttatccgcgcggcgcaaataaaataacacagacaccgatgagacaaatgaatgcgccgatccagtcatacagatcaggtgttttccggtcaacaagccatccccacaggaccgcaagcacgatgaatactccgccataagcggcgtatacacggccgaaagatgggaaggactgaaacgtcggaagaatgccgtatacaatgaggatcagcgccccggcgattccgtagccagctggctttgcctctctcagccatagccaaaccagatatccgccgccaatttcagcaagccctgccgcgagaaataaaagaatggtaatcagcatcatgagcactcctcaatttgcatttatctttcattatagaggaggagagcttttaaagcttcggatgattctcaaattccttcaaatacgcttttcgctgaacctctgtaaattggctgatccaattgttttgagcctcttcattcaaatggggaaggatatagcgttcaaccgcttcgaaaaacagcggattcgtgatgatgttccaggtcgggattcgaacgattttgccgtctgttttctcgatgataatatcctcaaaaaagatccctttcaaactgtattgatggcgtcccatataaagccgcttcacctcggaaaacagcacgctgcgctttctcaagaagatttcgccactaggtccggtctttatggtgaaaatgacatttccacggcttgtgaacgcaggaaaagccataaagaatgtgatcaatccataaatcatcgccagtaatccgccgcccaaataaagcagggcatatttagattcaaacgtgagggcttcagacaccagccagactcccacaataaaggcgccccctgtagcgaggaacagccaagcccttagaaacatcatgctttttacttcaatcatgtgctgcccctaaagcttcggatgattctcaaattccttcaaatacgcactgcgttggatgtctgtaaactgtccgatccaattgcttttcgcctcttcattcagatgtggaaggatatagcgttcaaccgcttcgaaaaacaacggattcggaatgatgttccaagtgggaatgcgaatggtcttctgatccacggtttggatcaatatatcttcttggaagattccttttagactaaatttatggcggctcatctcaattttcttgatatcagtaaacgtaacagacactttgtcagtgaacacttctccattttttcctgtctttatgcggaaaatggtatttccccgcggggtgaaagccggaaagaagatgataaataaatataaacaaaacaaggtgaacagaaagccagcaggaatggctaataggtaatatttcgtttgaaacgtaatacccatataaaagagccacaaacatgctaatcccataccggcagatccgacaaaagcccatattctcaggaacattttgcttttgacttcaatgatttcttggtttttcaatgcttttctccttttgttaattcaattcttatcattttgaaatgatttgatttacaacatccttatgagcagggaggatagaaaattcattctgggtgatgcctgtgacaagccaagtatggtgggcccccggcaggacgaatgccatgtcagccacttcaggagtgttatcttttccatatgccagacgcataagtgtatccattttccctttccgcaaagccagatcatttgcaaatcgggtaacgtcctcttggtggtcatgtttttcaaggaactcttttagatatgaagggttgtctgaagcgccctccaagagtttttcaaattcatttgatgtcaatgttacaatcgattctcttttatcctctgtatctattatatgtaaaaactcatctgtcttagcaagtaacccttcacttgattccatttttgtaatgcgatggacttgttcatcaaaaaggagttcgtgagagtaggtgccgaattttgatacatggcatgacacattctgttcggcaccttgcccgttaaatttagaaagcttcactgtatagtcagcgtcgtttaatacatggataaacggacagtactcgtcctttaaccgatattgatggttccgatattccgctgcatccttggctaagagtgagcggcacgcggcttcaaataaggcgccgagctgttcatcttctatttccggaaaataggcctgcttcaaggccattccctgttcaaaaaacccttcgctgtaaaagcaaaacaagagttcttctatgctaattgtaaactgcttcattgtttattctcctatccaaatgaaaatttccctttaaggaaatgggttgcgccgtgtataagcgaatccgctgttttctttgctttttccattccttttttcgcgctgtctatccctttatgtatcgatttattcgccgcatctatgccgtcattcactgatttgacgactttgccggctgattccagcccttttttggctgtatcaacaacagcatggatcggttctttcagctttaaggctgctttttcagcaaaaccggctgtatatttggcgatttgttctccgacgactccgccaatgtatgaacctgctgccccaagaaggacagtacccacaggtcctgcaaagcttccgattgcaccgccgatgacagcaccagctgtggcaccgccggcaacaaaaatcgtattattcacagcattcccgacggccttggcgttttcacgcttgagaacttccggtttatcctggtattttgcataattttcagcaattttcacgcctgctccgaatgtttcggtcgctccggtaatcagtgtggcggtaatggcatttcctttcgcgaatctcaagcccgtttttcccacatccttcaaagtggagcgtacgccggcttcattaagaaatccttttgtgtagcttctgacgctgtttgaaaaatccaccgtgtcctgaggaaagtattttgtaaactttttatgtaccaaatctgaaaatggacggtttgtctttttcaacaaatatttaggattcaaaagcactcttgccgctttttgataacgtgagctgtcaacggccctggaaatatccaagagcagttttgagtgctgggctgtatgcaagccgcttggttgtttcacaaatttcgtaagccctaatccgtaatattttccctgcgtcagcataagagcggttaagcttgtcatcgtaccgtatttgtcgtaggcattgtagagctttcgcaaaatatcatcttgttccacaaatttatcgcctgtttttctgatgaaaatctcattgtcactcagcttagtgacgagcgcctttcctgagctccacgcatcgcccactccagaaaaacagctgctgtagcggggatcgcattgcaaaatcatctgccccagctccacatgcaggtccttatatttgttttccatatcagttaattcagtgactacatcatttgcaagctgttcgagcttatccggatcaactgcaatgtttcctgacacaccgttcacctcccgagtttatgtctttcctctcttgctttacgctccagttcttccattctggcaatttcagcttttcgttcttctattttgacagcggcagccttcagctcttggcttgtttcaagcagctcctgttcgaattgatcgtaggcggctttcgtttcctcgaaatcctggtcaaacgaatctcttgctttgccctgccaagcatctcccaatgcagataaccgggattcaagcagcattttggagcttctgacctcttctgcggccgcactatacttgtttgccagctcaatgactttatatgagtccaacttttgtcccctgccttttctaaattcacgcacaattggatgttttatataaatgattataaataattcggcatgtatccgaatcgtacaaaagaaccttttcataagaattggaagggcgtatattcacttaaaattcacagttggtgagactttaagattacaaaaaaggtaaaaaaaccaaatctctcagacataaggcaaatgagaaatttcccgctctatgggaaaaaacactaaagttgatcaaatgacctaagtgcgccaaacgtgttacgggacgagctatctcatggtataaatggaattgtaaacgttatcaaggaggtcgtcatatgaagaaaaaatcattctcaatcgtaatagcgggcggagggagcactttcactccagggatcgtactcatgctcttggaccatttggaggagtttccgatcagaaagctgaagctgtatgataatgataaggagagacaggatcgaattgcaggcgcctgtgacgtttttatcagagaaaaagcgccggatattgaatttgcagcgacgactgacccggaagaagcttttacagatgtcgattttgttatggcgcacatcagagtagggaaatacgcgatgcgcgcgcttgatgagcaaattccgttaaagtacggagttgtcggccaggagacgtgcgggccgggcgggatcgcatacggtatgcgttcgatcggcggtgtgcttgaaatattagattacatggaaaaatactcgcctgatgcgtggatgctcaattattccaatccggcggcaattgtggctgaagctacgagacgccttagaccgaattctaaaattctcaatatctgtgatatgccggttgggatcgaagaccggatggcgcaaattcttggcttatcctcaagaaaagaaatgaaggtccgctattacggattgaatcatttcggctggtggacatcgattcaggatcaagagggcaacgatttaatgccgaagctgaaggaacatgtatcccaatacggttatattccgaaaacagaggctgaagctgtggaggcaagctggaatgacacgttcgccaaagcgcgtgacgtgcaggctgcagatcctgacacactgccgaatacgtatttgcaatattatttgttcccagatgatatggtgaaaaaatcaaatccgaatcatacgcgggcgaatgaagtcatggaagggcgcgaagcttttattttcagccaatgtgacatgatcacacgtgaacagtcctcggaaaacagcgaaattaaaatcgatgaccacgcatcgtatatcgttgatcttgcccgggcgattgcctacaacacaggtgaaagaatgctgttgattgttgaaaataacggtgcaattgcgaactttgacccgactgcgatggttgaggtgccatgcatcgtcggctcaaatggacctgaaccgattaccgttggcaccattccgcaattccagaaagggctcatggagcagcaggtatccgttgagaagctgactgttgaagcgtgggcagagaaatcgttccaaaagctgtggcaggcgctgatcctgtcaaaaacagtgccgaacgcgcgtgtggcaagactcattcttgaggatttagtggaggccaacaaagacttctggcctgagcttgatcaaagcccaacccgcatatcataaatgaaattcccccattttcgaatctgtaattgtatataatagaaagaaaatggggggatctgatatgcagctcgaagaactgatcaatcagcactacagcaaattgaatgacaacgattttcatattttaaaatatatattgaatcataagcacacatgctatcaccttggaatcgacgcgctggccaaagcttgcagtgtatcgcgttcctcaattttacggcttgcccaaaagctcggtttcagcggttacagtgaatttcgcgtctttttaaagtgggaagatcagccggaagaaggcgagagtatgagttttgaaaagctgcttgatgatattgaagcaaatttgaagtttttacggacaaaggacatgacggacatgtgccagctgattgatgcagctgaccgcattttcgtctacggttctggaaatgcgcaaaagatatgcgcccgcgacctgcaaagaatgtttattccgcgccatcgctatcttattttgattgaagacacaaatgaatttaatttgatgcgcgatgattttaaagtgaacgatctgtttatcatcatttctctttccggagaaacaccggagctgattcctcaggcaagaatgctttctgcaaagggtattccctttatttccattacgaatttaacaaacaatgtcctcgcccagctgactccgcataatctttatgcgacaagcaaacctgtgacattaagcgatagaacggaaattgtcgcttttgcaccgttttttctcgttggcgaagcattgttccgcgcatatgttgattacaaagaggcagaaaaaaatgacaatgagtagcagggggttctggtatgatgcaaaaaattcagcgctttggaagcgcgatgtttgtgcctgttttattattcgcgttcgccggcattatcgtcggtatcagcacgctctttaaaaataaaaccctcatgggaccgctcgccgatcctgacggtttttggtatcagtgctggtatatcattgagcagggcggctggactgtttttaaccaaatgccgctcttattcgccattggcatcccggttgctttggcgaagaaagctcaggcacgcgcctgtttggaagcgcttactgtctacctgacattcaactattttgtcagcgcgatattgacggtatggggaggagcatttggcgtcgacatgaatcaagaggtcggcggaacgagcgggttaacgatgattgcgggcataaaaacgctcgataccaacatcatcggagccatctttatttcttcgattgtcgtctttttgcataatcgctattttgataaaaaactgcccgattttctcggcatctttcaaggctcaacatatatcgtgatgatttccttctttattatgatcccaattgcgttggctgtgtcttatatttggccgatggttcaatcgggaatcggctcgcttcaaagcttcctggttgcttctggggcggtgggcgtttggatatacacgtttttggaacggattttaattccgaccggccttcatcactttatttacacgccgtttatttatggcccggctgtagcggaaggcgggatcgtcacgtattgggcacagcatctcggcgaatattcgcaaagcgccaaaccgctgaaggagctctttccgcaaggcggattcgcgcttcacggcaactcgaaaatcttcggtattccgggtatcgccctggctttttatgtgacagccaaaaaggaaaagaaaaaactcgtcgcagggctgctgattcctgtcacactgacagcgattgtcgccggtattacagagccgattgagtttacgttcttattcatttcacctttcttatttgcggttcacgccgtgcttgccgccacaatgtcgacagttatgtatatggccggcgtcgtcggaaatatgggaggcggactgattgaggcggtaaccttgaactggattccgctctttggcagccacggtatgacatatgtgtatcaaattttgatcgggctctcgtttacagcaatttattttttcgtcttcagatttttaatcctcaaattcaatatcgctacaccaggacgggaaaaggatgaacagcaggaaacaaagctatattcgaaaaaggaatacagagaacgaaaaaacaaggatgaaacggcctccgctgctgaaacggctgatgacaccgcttttctgtatattgaagcgctgggcggaaaagacaacatcactgaagtcacaaactgcgccacccgcctcagagtcagtgtcaaggatgaaacaaaggttgaacccgacagcgtattccgcgcgcttggcgcacacggcgttgtcaggaacgggaaggcgtttcaggtaattatcggattaagcgtgccgcagatgcgggagcgtgtggaaaaaatattgaatcaataaagactgccctccttttcgggagggttttcgtttgccgtcaaaaagaccgccatagtaaagtaaagaaagagacaatcgagtaaaaaggggtttggaggcttttacatgcaaaaggctttgtcgtttttaaaaccatattcattgctggcgggaattgctctgattcttatgctgacggagcttgcagttgaactgatgcagcctttattgattgcaaaaatcatcgacgatgggatattgaagcaagatctgcggcatgtatggatatggggcacggtcatgatcgggctgaccgtgttatcctttgcggcggggatgctgaattccttttatgccgcccatgtcagccaaagcttttcctatgatacgagaaaagggctttttcaaaaaatccagtccttctcctattccacatttggacagttttcgtcctcttcttatattacaaggctgacaaacgacgtcacacaggttcaaaatatgatttttatgagtttgcggtttatgctgcgggctcccttaatgattgcaggcggcattgtgctgtcgcttgccgttaatgtgaaactcgggttttttctgcttgtgaccattccgatcctgatcttgtttttgctatgggtattaaggaaaggcggggcactgttccgctcagtgcagaaaaggctggatcaagtgaacaccatcatgcaggaaaatttaattgcaatcaagctgatcaaagcgctgcttcgcggcagccacgaagtcaaacgatttatcaaagccaacacaaggctgatggaaaaaacggtttcggcctttcagcttgtggaattcacgatgcctgtactgatgctgctgatgaatctctgcatccttttgattttgtgggcggggtcctacagtattacgagcggaagcactcaggttggcgatgttgttgcgataattaactacgcaacacgaattacaggcgcgctttcgatgtttccgtttttgattatgattttcacccgggcgaaggcttcaggggatagaatcggtgaggtgcttgaaacagaaggcgacgagcgggaggaaggcaccatatctgatcgtttgtcaggacggattgagtttcagcatgtatcctttcgctatcctgaaatggacagagaagcgctcaggaatgtctcattttccgcaaagccaagagaaacgatcgcgattctcggtgcgacgggctcgggcaagtccacgctttttcagctcattccgcggctttatcagccggattcaggccgcatttacatagatgaaaagccggttcaagatattccggctgaagggctgcgcaggcaaattggatatgtaccgcaggaagtcctcttgttttccggcacaatcaaagaaaacatcgcttggggcaaagaaaatgcttcactagatgaaataatggatgcggcaaaacttgcgcaaattcatgaaacgattttaaagctcccaaatggatatgacactgttttggggcaaagaggcgtcaacctgtccggcggccaaaagcagcggatttccattgcgcgggcgctgattcgaaaaccggctatccttctattagatgacagcacaagcgcgcttgatctgcaaacggaggcgaagctgcttgaagcaatcagcacataccattgcacaactttgatcattacacaaaaaataaccacggcgatgaaagctgatcagattttgctgcttgaggacggcgaactgattgaaaaaggcactcacagtgagctgctttctgaatctcagttatacaagcgcatttacgagtcacaattcggaagggaggggagcgagtcatgctaaaagacatccgcaagcctttccaatatcccaaactgccaattgacaaaaaagaaggcgcgaaaaagcgggcgaaagcaaaggatacaaagggcacactgagacgaatctggtcttacttggctgaaagaaaaggactgctcatacttgtcatgctaatggttgtcatcagcgccatattcggactccttggtccctttgtgatcggaaaggccatcgaccattttatcgtcgggaaaacggtcagcggcttgattcctgttttgcttcttctgctcgctatctatatcattcagtccctgtcgctttggtttcaaaactattggatgattacgatctcgcagggcacggttttcagaatgagaagcgaattgttcacccatctgcatgagctgccgattccattttttgataaacagcggcacggcgagctgatgagccgggtgacgaatgacatcgaaaatgtcagttctaccttaaacacgtcagtcattcaaattttgtcaagtgtgatcacctttgtcgggacgattgcggtgatgctgtacatgagcccgctccttactttgattacgctgaccattattccggtgatggcagcgagcctgaaatggatcaccaaccgaacgggaaagctgtttaaagaacagcagaaaaaccttggtgatctgaatgggtatattgaggaatctgtttcaggcgcaaaggtcatcaaagcatattcacgtgagaagcagattactgctgaattcctcgaaaaaaacgctgcactcaagacgtcgggcttttgggcgcagacgatttccgggtttattccgaaggtcatgaactctttgaataacttaagctttacaatgattgcggcaatcggcggtttgtttgcgctgaaaggctggatctcgatcggctccatcgttgtctttgccgagtattcaagacaatttacacgccctttaaacgatctggccaaccagtttaatacgatgctgtccgcaatcgccggcgctgaacgggtgtttgacgtgcttgatgaaaaagaagagcgcgaggatgaaaagaacgccgtgcatcagcccatccaaacaggcagcattgaattccgggatgtgtccttcggttacgataaagggcagcagacactgaagcatttacagtttaccgtgcctgcggggcagtccatcgcgtttgtaggaccgacgggggcggggaagacaaccgtcactaaccttctcgcccgtttttacgagcctaacgatggaaaaattttaatcgatggtacagatattaaaacccttactagagcaagcctaagaaaaaacatggggtttgttcttcaggattctttcttatttcagggaacgatcagagaaaacattcgctacggcaggcttgatgcttctgatcaggaagtcgaagccgctgcaaaaacagcgaatgcccatagttttattgaaaggctgccaaaagggtatgacaccgtactgacgcaaaacggttcgggcatcagtcaagggcagaagcagttgatttctatagcgagggcggtgcttgccgatccggttcttctcattttggatgaagcgacaagcaacattgataccgttacagaagtcaacattcaagaagcgctcgcccgtttaatggaaggaagaacaagcgtcatcattgcccacaggctgaacaccattcaaagagcggaccagattgtggtgctaaaaaacggtgaaatgattgaaaaaggcagccatgacgagctgattcggcaaaaaggattttacagtgacttatatgaaagccaatttgagaaatagacctttgtcctgcacagaggtctttttttgttacagttttatagtacttttatttcattttcgtaaaatgtaacaaaattacttgacgtaaacaagttatgtatatatactagcttacattaagtaagtgataacatttatcaaggaggataaaatgaataaatcatttgaaattggcacattacttttaagagttattacaggtattatcttttttgttcacggtttatcaaagtttcagggaatggagggcaccatccaatttttcggcagcataggccttccaagctttatggcgtatgtcatcgcagcgattgaactgattggcggagtgcttgtcttcttcggattggctacacgtattgtcggtgtactgttcgctcttacactgatcggcgccatcatcactgttaagctgaaagcgccattcatgggcaatgcagaatttgattaccttctgcttttgacatccattcacctggcgcttactggaagtcgattcctggcgctggacccatttgtgtttaaaggaaaaaagaacggaaacgtttcagcataagaaaagaggcatgcagcatgaccagcattcatgaggatacacacattggctatgccaaactcacaattcgcagtctggagcgttcgcttcagttctactgtaacgtcatcggttttcaagtcttaaaaaagacggaccgccaagcggaattaacggctgacgggaaacgcgtactgcttattcttgaagaaaatccgagcgctgtcgtcttgcctgaacggtctgtgacaggcctttatcactttgcgattcttcttccggacaggaaagaacttgggatcgcgctcgcccgcctgattgaacacggcattgctatcggacatggagaccatgctgtcagcgaagcgctctacctgtctgatcctgacggaaacggcattgaaatgtacgctgaccgcccccgcagcacgtggcagcgtgatcgggaaggaaactacgtcatgacgacaaccgctgttgacattgagggccttctggaagaggcaggagatgagcggaaaacatcgcttccgaacgatacaatcatcggacacattcatctgcatgtcagtgatttgaaagaagcaaaggcgttttatacagatgtactgggctttgacattgtcggaaactatgcgggcatgtccgccctcttcgtttcagccggggggtaccaccatcatatcggcttaaacatttgggcgggaagaaatgcgccgcctaaaccgacaaatgccagcggactagattattatactgttgtcctgccccaccaagaggagctggatttggtggcaaaccgagtcaaacatgccgggtattcgattgaagagacggaaaacagctttcgtgtgaaagaccctgtttccggcgcctatattacatttgtgatttaactgcaatccccttgccgaaataacggcagggggattttttatttttgtccgccttgttatgatgagagaaccaacttgttaggaggcgtttacatggaactcaaccaccttgtgacgggcaaaatagcattaaatcaatatgtgcatcgcttagagcaaaaggatgtttcattttacgtccactactggggagcgatgacgaaccactataacacactgcttcataagcattccttttatgaaatttgttacgtggtaagaggtgaaggatattaccttgaaggcgatcgtacatatccgcttcgtgaacagacgatttttttgtcaaagccggagcatttgcaccaaatcaaaagtgaaacagggctgttccttttttacgtcgctttcgagctgagcgaggatcagtcaagcgccgaatggatcaaagtgatggaagaagtgaaacaaagcccctttatcacaatgcaattgaaagatggcgaaccgccgggcctgctttggaaaacgttaatgctgcaagcagcgcaacctgtcaatgcttttgacaaagagatcctatctcatttgtcgcatgcattgatcctgtcattaatccaaacctttctcccgtacgcccaacgcccgaaacaaaagcagcccattcacacatcttctgctttgctgacagaggtgaaactgcacataaaagacaatctgtcacagccgttaaagctgacggatgtcgctagccactttcatatctcagggaggcatttatcacgtttatttgcagcagaactgggcgtcagctactcagaatttgtccaaaatgaaaaaataaacaaagctgccgaactgctgaaatcaacgaatttgtcgattaaagaaatagcggaagaaatcggtttctcagtacattatttcactcgcgtcttttccgctaaaatcggcagctctccagggcttttccgctccctttataaagactcaaaaatgaccgcatttcaaatcaataaaccttttcaaaaaatcgaacaggccaagccgcacgaataagatgtcctgaaatgacaaaacaatgtcttcatatgataaagacgcgagaaatctcgttgtcttataatctttttagaaagcggttacaacaaggggtattgctgaaggagggatgcattggcttatgcttggtgtcgggtgctctgccattcttgaaagaaggggaagaaagccgtgagtacaaaaaagaaagaggctgtaataggaaaagaaagcttagctcataaagggcttttacgaacgattacattggtatctacattcggcggcctgttgttcggttatgatacgggtgtcattaatggggcacttccttttatggcaactgcaggtcagctgaatcttacacctgttacagaaggactggttgcgagttccctgcttctcggggcagccttcggggcgatgtttggaggacgtctgtccgatcggcacggccgccgaaaaacgatcctttatttagccttactcttcatcgcagccacacttggctgtaccttttcaccaaacgcgtccgtgatgattgcctttcgttttctgcttggactggcggttggctgcgcttctgtaacggttccaacctttttagcggaaatttcgccggcagaacgcaggggacgaatcgtgacacaaaatgaactgatgatcgtaattggccagcttctggcatacacctttaacgccattattggcagcacaatgggggagagcgcaaatgtatggcggtatatgctggtcatcgcgacacttccggctgttgtgttatggttcggaatgctcatcgtgcctgaaagcccgcgctggctggcagctaaaggcagaatgggtgacgccctgcgggtgcttcggcaaatccgtgaagacagtcaggcacagcaggaaataaaagaaatcaaacatgcgattgagggcacagcaaaaaaggccggctttcatgattttcaagagccgtggataaggcgcattctattcattgggattggaatcgccatcgtacagcaaattaccggtgtcaattcgattatgtactatgggacagaaattctgagagaagccggttttcaaacagaagctgcattaatcggcaatattgcaaacggtgttatttcagttattgcggtcatttttgggatatggcttctcggcaaagtccgtcgccggcccatgctgatcatcggacagattggcacgatgacagcccttctgctgatcgggattttatccattgtccttgaaggaacacccgccctgccgtatgttgtgctgagtttgaccattttgtttcttgcgtttcagcagactgccatttctacggtgacgtggctgatgctctcggaaatctttcctatgcatgtgcgggggcttggcatggggatcagcaccttctgcttgtggacagctaactttctcattggattcacctttcccattttgctcaatcatattgggatgtcggcgacattttttatctttgtcgctatgaatatcctagcgattctatttgtgaaaaaatatgtgcctgagacaaaagggcggtcacttgaacagcttgagcattcctttcgccagtatggccgccgcgctgatcaggaaatccaaaatcaaacaactcacttatcgtaacctgagataccaggaggaatctatcaatgaaactatcttatgtaacagacagcctagggcatttgccttttgaagacatgctcaattttgccgcaaagcttgggatcgatacacttgaaatgacaaccgggggctggtcgccggcacctcacttgaatcttgatgaattgctgcaaagcagcgaaaaaagaaaagaattttcacaagcgctggaaaagcggaacatgacactttgcgcattaaactgctcggggaaccctttagatccgggtgaattgggcaaatcgcacagagacataactgacaaaacgatggagctggctggattattaggcgtcaaaaaagtgatcatgatgagcggtttgccagccggcggcccggacgacaaagtgccgaactggatcacatacacagtaagctggcctcccgttttaaaagatatcctcaactatcaatgggaagacgttgcgatcccatattggaagaagcttgtcaaaaaagcggaggcctgcggcgtggggaaaatagcgcttgagaacttcagctctcaattagtctataatcctgagactctctttcggctcagaaatgcagtcggcccgatggtcggtttgaatcttgacccgagccatttgttatggatgggcgcagacccgatcatcgcagcaagggagctcggctcagccattcaccatgtccatgggaaagatgtcagaattgaaagatatttatcggcggtcaacggacttttagaaacaaaagaagtgacagatcctgcaaaccgggcgtggaattacgtagctgtcggctgtggacaggatttacagtggtggaaggaatttttttcagttgtaaaaatgatgggatatgaaggtgaggtttctttagaaatggaggatctgacgatgtcacctgaagcgggcatccgtacttctgtagaagctttaaaacaaaccatcagccaataggaggttttcatgatgctaaatggagaaagaatcatctctaagccgcttcgctgggcaatggtaggcggcgggcggctcagccaggttggatataaacatcgtattggagcgctgagagacaatactgcttttcaattaactgctggcgcttttgatatcgatgccgaaagaggaaaagatttcggggtgaaccttggagtggatgcggaacgctgttatcccaactatcaaaccatgtttgccgaggaagcgaaaagacaggatggcatagaggtagtatcgattgccactccgaacggcactcattatgagatttgtaaggcggcgcttgaagcaggagtgcatgtcatctgtgaaaaaccgctgttcttcacttcagcagaggggcaggaaatcaaagcgctcgcagagaaaaaagggaaaattgtcggcgtgacgtacggtttttcaggcaatcaaatgcttcttcaaatgcgtgcgatgattgaacaaggaatgatcggcgatattcgcgtggttgacttgcagtacacacacggtttttgtgcaacagatgaaggtgaaaagataagcgctgcacagaaatggcgtgtcgaccctgcgatcgccgggccaagctttgtgctgggcgatttatctacccacacgtattatatgtcacagcttattatgccaaagatgaaaattaaggagctgctgtgtgaccgacagagcttcgtcggcagccgcgcaccgctagaggataatgcccatgtgctgatgcattatgaaaatggagcggtcggaacgatgtggacatcgtcaatcaatgccggatgtatggatggccatagaatccggattgtcggctcaaaggcaagcattgagtggtgggacagcaagccaaatgaactgacgtatgaagtgcagggagagccgggccagacactcgttcgcggcatgccgtatttagatgatgtttgcaacgccgatgaacgactgggcgccttacacagcgaagggctgtccgaagcatgggccaatatttatcttaaatttgccattgcgatagacgccaaaaaccgtgaagatgaagaaatcttgaacaacttggtttatcctgacattgatgcagggatcgagggcattcgctggattgagaactgcgtgcgctcggcaaaccaagggtcagtttgggttgaatttaaataaatgagggaatgcgccgcatatgacataaagttcatatgcggtttttattttccagaaactcctgtcaaaaatgccctgaggcaggtatgataagaagggaattgggtatcgggagtgatgagcgtgaaagctcttttttttacgagaatgttcaccttgatggtgagctgtttaatgtatctgtccattgtgaaagaggataactggtttggatatgtatttatagcagcaggtgctgccatgtatgcagccaatcatgttttgctgacaaaagagacaaatgccatctggttctgcctgattgatattgcaatcggcttttcgttcggatttatctttcccggcacaggtttgttcattattatgctttgtccggttgcggtcgccttttttctgcgggggtttcctaaaagaacagcatggtctgtcttatgtctttcctctattttatttttgaccgtcctcatccgtacatatgcgatgttcggcaatgaatttgtcattgatcatttgactagcatgacattcgttgtcttctgcggtgtcgtgggcaaattaatccgcaagctgttggatgcgcaggatacggcaaaacagcagtttcaggaactgacggagtcccatctggcgctgtctgctgcacatcaggagctccatttatatgcgaagcaggttgaagagctgactgccatttacgagcggaacagaatggcgcgtgaaatccatgatacagtggggcataaaatgacggcccttctcgtccagctgcagcttttgcgtgaatggcaaaaaagagacagccaaaaagcggatgagacagtaggtgtctgtgaaacacttgcccgtgaagcgcttgatgatgtccgcttatcagtacgcactctgcaaactgaaaacgatccttcgctaatcgaatcgctgaaacagctgacagaggacttttgcaaaaatgcaggagtcacaacagaatttgcggtcagcggtgatcctgcaatcatcccgctgtctctccatccgaccctgatcagaacggtgcaggaagcactgaccaatgccaaacggcacggcggcgccgcagcctgttcgatacagcttgcctgcacaacggacagcatcagccttgtcattaaggatgacggcaaaggcaatcctgaggcagcacttggttttggtctcttgaatatgaaaaagcgggcagcggagcatggcggaatgatccgctttgaaagcgaacgggatcaaggatttactgtaaatgcagaattttcacttgccaataaaaaatggagcttcgggcccgtgcagcaaaaggagagtttatcatgattaagatcatcattaccgacgatcaggatatcgtcagagaagggctggcatccctgctccagctccgagaagagctcgatgtgatcgcaacggcgcgaaacggacaggaagccttcgaaaaggcgaaagagctggagccggatatcgtgttaatggacatccgcatgccggtttccaacggggtggagggaacaaaattaatcacaagctcgctgccaagcgtaaaggttttgatgctgacaacctttaaggattcagcgctgattgctgaagcgcttgaagagggagcaagcgggtatctgctgaaggatatgtctgcagatacgattgtaaaagcagtgatgactgttcattctggcggaatggtgcttccgccggaattgactgcccaaatgctgaatgaatggaagcgtgaaaaacagctgaaaggaataaatgagatagaaaaacctaacgagctgctcgacctgaccgagcgcgaaatcgaagttctggctgagctgggatacgggctgaataacaaagaaattgccgaaaagctttacattacagaaggcacagtcaaaaaccacgtttcaaatattatcagcaagctggctgtcagggacagaacccaagccgccatttactcggtcagatatggtgtatctgtcttttgacatatgacgttttgcatatacgcttctctgaaaaggccttttacaggcctttttttcatgccctatgttctatctgccgctacatgccgcacgcctttctttcttctacaatggcaatggatcaaaaaaaggagtgagacgacgtgctgcaagcagaaaacatcaaaaaggcatacggaaaaaaaacaatcgtgaaaggcatttctttttccctcaaaaagggggagtcgttcggtctgctcgggcctaacggtgcggggaaatccacaaccatctcgatgatttccggccttgtgccgcatgacagcgggaacatcacggtgggcggctatgttatcggaaaagaaacggccaaagcgaaacaaaaaatcggcattgttccgcaggaaattgcattatatccgacgctgacggctcatgagaatcttatgttttgggggaaaatgtacggacttacgcacggtgaggccaaaaaaagagcggctgaggtccttgaatatgtcggtctgactgagcgggctaaagataagattgaaacattttccggggggatgaaacgaagaatcaacatcggtgcggctttaatgcataagcccgagctgctgattatggatgaaccgactgtcggtattgaccctcaatcgagaaatcacattttagaaacggtcaaacagctcaacgaaacgggcatgacggtgatctatacgagtcattacatggaagaagttgagtttttatgcgaccggatcgggataattgatcagggggaaatgattgcgattggcacaaaaactgatttgtgcagccgccttgggggcgataccatcattcagctcacggtcagcgggatcaatgaagcgtttcttgtggcgatccgatctctggcccatgtgaatgatgtaacagtacatgaattagagctcaaaattgacatttctgcggctcatcatgagaaagtcgtcacaagcctgcttgctgaagccactgctcatcatataaacctgctgtctcttcaggtgcaggaaccgaatctggagcgcctgtttctgaatctgaccggccgcacgttgcgggattgaggagggacggcaatgaaaaaaagcatatggatcgcatggaaagatgtgaaaatcagaatcacggacagaaaagggtttatgatgcttatcctaatgccgctcatcctaacctgtattttaggcgcagcgctcggatcagttgttgacggaggcagccggattgatgatatcaaagtcggctacattcaatcagaccagtcagatacagcaaacatgtttacaaaagatgttctcaaaaaaatgaagtcgataaaggtcacaaaagtcggcagcaaagacaagatgaaaaaactgattgatgaaaagaaaatcgatgtaggcatcgttatcccgaaccattgggaagccggcaaaacctcagctgttgttaatgccgctcctgatcaaacattgaaaagttccatcattgaaacagctgcaagctcatttatagagcaatataaagcggtaaaggaagccgcgtcaggctcaatggactacatcagtaaaacggaagctgtaaagcaaggaaaacttgaccctgcacagtttgcagaaaagctggcaaagacgctagaaaaagaaacaggtgacaagcttactattgcggaaaaatctgtcggcagcaaagccgttaccagttttcaatactattcggcggcaatgctttgcatgtttatgctgtttcatatcacagtcggggcgaaatcatttttacaggaaaaggatacggagacgcttgccagaatgctgatgacgcctgcgcaaaaatccgtcattctcttcggaaaatggcttgggacgtatctgtttgccatcatacaatttttcatatttctgatcgtcacaatcaacgtatttggtgtggactggggcggtaatctgctgttagtgagtgtactcgggctttcttacgccgcagctgtatctggtatttcaatgctgcttgcgtcgtgcatcagcgatatgaaaactgcagatgcgataggcggcttcggcattcaattgcttgcggttctcggcgggtccatgctgccgctgtaccaatttccggacgtcttgcagtctgtatccaaagcggtgccaaatcgctgggcgcttgacggctttctttctttaatggaagggggaggctgggctgaccttcaaaagcctgtgcttctttttgcggcgatcggcttttgttcacttgtaattggtatcagacggcttcatacaagataaggaggtacaaaaggtgaaaaaaattctagccatttgcggcattgagctttctctcatttttaagaagccacagaactatttgatcatgtttgctgccccgcttttgcttacctttgtatttgggagtatgctcagcggcaatgatgataaggtgcggcttgcaatcgttgatcaggacgatacgattctctcacagcattatattcggcagctgaaggcacacgatgatatgtatgtattcgaaaacatgtctgaaagcaaagcgtcagaaaagctgaaacaaaagaaaattgccgggatcatcgtcatttcccgctcgttccagacacagctggaaaaaggcaaacatcctgagctgattttccgtcacggccctgagctgtcggaagcgccgatggtcaaacaatatgcagaaagcgcattggcaacgctcaatattcaggtgaccgcggcaaaaacggcatctcagacagcgggagagaactggaaggcggcgtataaaacggttttcgccaaaaaacatgaagatatagttccggctgtaacacgacagacgctcagtgataaaaaagagggtgcggaagcaagtgacacagcctccagagcagcagggttttccatcctgtttgtcatgctgaccatgatgggagcggctggaaccattttagaagcaagaaaaaacggcgtatggtccagattgcttacagcctctgtcagccgagccgaaatcggtgctgggtatgtgctgtccttctttgtcattggctggattcaatttggaatattgcttctttccacccattggctgtttggcatcaactgggggaatccggctgcagttattgtattagtgtcactttttctattgaccgttgtcggcattggattgatgattgcggccaacgtcagaacgccagaacagcagcttgcgttcggcaacttgtttgtcatcgcaacatgtatggtgagcgggatgtattggccgatcgacattgaaccgaaatttatgcaatccatcgctgaatttcttccgcaaaagtgggcgatgagcgggttgacagagattatcgctaacggtgcccgcgtcacagatattctcggaatctgcggcattttgcttgcatttgctgcgatcactttcgcagcggggctgaaagcgctccgagcctaaaaaacatctgccgtttaggcagatgtttttttgcatgtgggtacattcgtatgggtgcagcctgaactgcggttaatccttatctatcatagctaaaattgattccagccaagaaacgtaatttttctcccgctccagcgctttcgttagcacaagatagtggccgaagtccggtgaagaaaatgacatcggctctgctgaagccataagcttttcatagcttccctgtaagtcagaaagcttggcctggcgtttttgcagctggtctttgaacaaatcagaagcctcctggcgcgatagacaagaaatgaaataagccttcagcataaattcatccttcaccgtctcgggtatcggctggtggcggatcagccagtcatgcagctcctgctttccgctgtctgtcagggtgtacatctttttctccagctttgtgccctgaatcgttgtccggaacgtgataaatccttcatccgtcagctttttgagctcagggtaaatctggctgtgcttggcgctccaaaactggccgagctcctctttaaaataactcgtaatatcgtatccactcaattcgccttttcgcaaaagccctaatatggcgtattttaatactctcatgctatcctccgtgtctggctgtttcgcaaaacagatgagccggtgctcaactgtgattctaactgcctattccccttattatagaaaagggaggaagggaacacaaccgggctctttggaaatgaagataaaaggtttgtcagaaggtatccgatttatctccgtcaatataaaagagatttaaatttaattttcagaaaaaatagtaacgatattgattttttatatataataggaaattggtggtatgaaaattttttgggggaataaacgtgaaaaaagtacttatggcattcattatttgtttatcgctgattctatctgttttagccgctccgccgtctggcgcaaaagctgagtcagtacataatcctgtcgttcttgttcatggaataagtggtgcatcatacaactttttcgctattaaaaactacttaatttctcaaggctggcaaagcaacaaactgtacgcaattgatttttatgataaaacaggaaacaacctaaataacggcccgcagcttgcttcatatgttgaccgtgttttaaaagagactggggcaaaaaaagtagatattgtggctcatagtatgggaggcgccaatacgctgtactatattaaatatttaggcgggggcaataagattcaaaatgtcgtaacgcttggaggggctaatggtttagtgtcatcaaccgcgctgccgggcacagaccctaatcaaaagatcctctatacatctatttacagtctcaatgatcaaattgtcatcaatagcttgtctcggttacaaggagcgcgaaacatccagctttatggcatcggtcatattggcttgctttctaatagccaagtgaacggctatatcaaagaagggctgaatggcggaggcctcaatacaaattaatatcttcaaaaaacaacctgctgtctccgttacagtgggttttttcgtctgagaaagccatagggtcttatgaccttagtctatcatgcatacgtcaatttatgacatcaggcactttttcaaatagagcggacatgttaaggtacaaccatcgatttctatcaatttgaaataaaaggagcgctgttatgcaaattaaagaaatttttatgatccgctgcatttcgtgcttaagtgtcgtcttgctccatatcatttcaatggtcctgatgcttcaggcagaagctcttgcagatatttctcacactgttgattctttccgcacactcctgatgttcagcacgcccgcttttattttcatctctgaatttttactggcccgttcttatcctgatggggtgcctgacggttttttaaagaagcggggaaaagtgatttttgttccttttttatttatcgcagccatcgatgcgctgctgatgaccagtgcgatggggggagaggtaacctttctcgcgtttgtgcaaaaatatctggcgaacgtattcttaggaaactttatcggatacttcattctcgtcatctttcaattttacatgctgcatatgatgtttcatgagtatttgaaaaaagcatcgccgaaatgggtgctgtctatctcatttgtggtgacagccgcttatttaggctatttctccgcagccagcccggctcctgcttctgaagagggaggggcatttccgttcttctgggttccgttcgcaggctggcttttctacttttgtctagcctactattgcggaaaagaatacaagcgttttttagcgctgctgaaccaataccgctgggtggtgtacggcgccgcaattgcttctggggcgctggttgtcactgtttcttatgtcggtgaaatcggcatgatcagctcgaagcggcctgatatcatgctgtattcaacaagcatgattttcctgtgttttcatttgttttccaaaatgaagcatgtgccgaaaatcatgatgtttatcagcaactattccttttcgatttatctgcttcatgcctattttatgattataggctacgtgttgcttttgaatatgcccgaaattcctgccgtaccggctgttctcctgttgtttgccgtgtgcacagccggcccgattatgacctcatgggcgctgaataagttcaaatacgggtatttatttgtggggaaaatttatcagccaaaacagaagaaggtaacagtcgaagtgcgtgatcacgcagggtgaaaaacaagcggcaggagggctcctgccgcgtttctttacttctcatccgcttgcagaactgtttttaaatatagttttgcagactcagcaagtccagatacatcagccttttcttcatcgaaatacagggcgttttgaatgatgccgtcattcatattgaggaaaaacttggcgatagtcgcaagaggctgaaccggctgaaactctccctgatcgatccctttttgcaatagccttgaaaacctttccacaaaaagatcataccttttctccaaatactgccgccgttcttcattgcgccaagctgtcactaaatattcaaattgcaccggcgccagcgtatctgctacatctcgcaggccctcagtcagttcatccaaatagctggaaatggaggcccaaacactttggtgttcagctgatttatcaagctttcggagtccttcatccagccctgtttcaataatgcggcgaaacatctcctcagtgcttgaaaaataaagatagacaccgccccggctgaaacctgactcttctacaacatccttcatcgtcgttaattcgaatccttttcgtttaaaaaccgttttggcagcctctaaaatctctgcctgccgtttatccttgtgctcctttgttacttttggtgacaagatatcgcctgctttctgcaattttcttacctataagtgtaatcaacccaatcatgatcagcaagcagccacagacaagaaaagcaagtgatacaccgatccattccgccagcacgcccccgcccgccatgccgaggatagaggcgagggttgtcgcactctgaatagcgccgaacaccctaccgctgtaatcgacaggcactgttgtttgcacgagaatctgaaatggaatatggacgaggccgaaagccgcccccatgatgaaaaaagcaaatataaagagagtgatgccggcaattcccataccgcttaggaatggcgcacctccagttgctagtccaagaagaagggttccagctgagaaataaagcaaataagaagtgattcgccgtctgccggtaatggccgctgtaaggagcatcccggctccgcttacggccatgcaccagcctgccagctcgggcggagctcctgaaaaggagcggataagaataatcgcttgggaatcaccaatctgcaaaacaaagagaacgacacaagctgttagtaagcctgttaatagaagcggcatccgtttcaaaaactgaaggccttccttgatagaagtaagtgctgctgttttttcttgaggtgtattggctttttgtaaaaaagcatctctgggaaggaaaaacaaaatgacagcggaaagaaagaaggcgccggcgtttatataaaaaacagagtgtatcgagaaagcagcgatcagcgtgccgccaagggcagggccgaagatttttgagctgttatcaatgatgctgctgacggaaacggcctgctgaatgtgtgcttccggagccaattccttaagctttccgtttttagcaggtaaaaaaagtgaagaaaaacagctctgaacggatagcaatacgtaaagctgccaaagctcactgacataaacgcagctgataacagtgagggcacggccgatttcagatagaaacatgatcgtttttctgtcaaaacggtcggcaagcagacccgatacaggtccgagtacaatgacaggcaaagcaaacgacatcattaaaagcgacatatctaatggagaagcatgaagctgaaaagcggctaatgttagcacggccaaaatgtgaagccagtctccaagtgaagaaatggtttgcgaggctaacagtgtcatcagtcctttttgattgcgaaacaacggtttttccatgattcatcctcctgattattaaaatgacactagtgtcgtttttaattgtatgggaaaaagacacaatatacaatctttttcttgtaaaataaaggagaagattgaatagaagggagaacattcatgacatcagtcaatctaagctacccaataggagaatacaagccgagggaatccatatcgaaggagcaaaaagataaatggattcaagtacttgaagaagtgccggcaaaattgaagcaagctgtagaggtcatgacggacagccagcttgacacaccgtaccgggacggtggatggaccgttcggcaagttgttcatcatctggctgacagtcatatgaacagctatattcgttttaaattgagcttgacggaagagacaccggctatccgtccgtatgatgaaaaagcatggtcggagctaaaagactcgaaaacggcagatccgagcggctcactcgcgcttttgcaggagcttcacggaagatggacggctctgctccgcaccctgacggatcagcaatttaagcgcggattttatcaccctgatacaaaggagatcattaccctggagaacgcgctcggcctgtatgtctggcactcacatcaccatatcgctcatattacggagctttccagacggatggggtggtcttaacgcttttgccggcggaaagccggaatactgatagcagcaatcaccagaagtgagaccacagcagccgctgcatataaatgatcatagccgctggcgacactcgcatgaatggcgtcgcttatcgcggttttgacttcaggaacgggaatgcgttcgatttgttcttgtaaagaagaaacttcagaactgtcgatctccggaatcatctgcatcgccttttctgaatatccgctgtccgataagcggctgttgatctcatcacctatttggtcaaacccggctgtgataaaacctgcataaagagtaggcgccaaggtcagtccaatttgccttactaatgaaagcgtgccaagagctgtacccttatttgtttttgccgcttctgatacaaggacgttcagcggagcgcctaacagaaagccaaaaccgatcccagctgccacacttgcgatcacaaactcccatttttccgtgacccagagcggaaataaagcaaaccccgcacatgagatgattcccgaaagaataacggtttttacaggaccttttttgtcggtaagtgctccgccaagccaagcgccgattccggaagccaacgcaagcggtgtcatccaatagcctgcttttgcggcagggacacccaaatactgttcgacatatgacgggataaaaatgactgccgccaagagccccccggataacaaaccgatgataagcgtgcgctgaaacatatggtttcgcagcagagaatacgccaaaatgggatcgcctcctcgcatttcaactctcttttcatacgagataagcgctgcaaaacagagtatgccaaaaataatacatccataaacctccggattccccaagctgtgtaagagatttgccccgtcaagattggtcatgccgtacatcacagctaaaatcgacagggacaaaaggaagattccggccgcatcgaggcgcttagcctcaggtgcttttgtttccgcgataaaacatgcgccgaaaacaaccaatagcacggcaatcggcaaattaatcaaaaatagccaatgccaagacccggtccaatcaagcagaaagcttccgatatttggcccgagcacagcggccatcccgttcattgcgccaagcagcccaagcgccttcccctgtttttcctttggaagggtcgcgagaatgtgagagctgccgatgatgaaaatcccgccgcctccaagcgcctgaatcagccgcgatatcagaaagagcgggaagctttggctcaaagcaacaagcaaagaaccaagtccgaacaggcaaacctcaatgagaaagagtttttttctgccgtagcggtcggaaagttttccgacgattggcacactgacgctaagaccgagcgtataaagggtaatgccccatgatccccaggaaggggaaacggaaaacgactcgtttatcgttgttaaagcagccgaaataattccgttatctaaagcagccataaacacgccaatcgtaaacaggctgattgcccacttttggcttttctgctctgttaatgcttcagacattttcgtcaactccttttagttcacttgaaatatattattcattttaaatgaactaaatgtcaaataaaaaaagcctgctcccgcagtttgcggatgacagacttactgatttattcttttttcgcattctctaatgctcttgaaaggatagacagcccttcgtaaacagcctgcttttcttcaggggacagcagctctaatgaacgcttcaatttcaggtggcccttttcatacaaaccccggaaaatctttttcgcattctctgtcaactgaacaactacagagcggcggtcctcttcagaatgtgagcgtttgacaaatcctgatttttcaagccggtcaagcagcccagttgtattggacagggaagcccccattttttcagcaatgtcgctcactttcaatgttccatggttgtttaatagcatcagcaccttcatttgcggcatgctcatatccagtttcatccactcggacacatcaccgagcccggcggacgttaagactttcatatagagcacccatatttcccgttcctccgatgaaagaatgttttcgtttaagactgttgtatcgtgtaaattatattccatttcatcacttcctcatcattcactcctcttaccatattactcgattttcactcctgaaagaaagtgagcagaaaccgcatgcgggactttgtccgaaaaataacggtagtgtataatgagttggagattattgggggagaggatcgaactagaatatgattggagagaccattgctgattaaaaagaatgctttatcaatattaaaaatcgtttttcctattgctgttttgctatttgttatttatcaatcgaaaaaagaactgacaaatctgtcattcaaacgtacgctcatggtcatcaacggactggaacgaacggatttattcatgcttgtgttgatcggcttgctggctgttgcggctatgtcgctgtatgattacgtcctgaagtactcactgcgcctatcgatcacaaacggaaaagttttcagggtttcctggatcgccaattcatttaataatgtgttgggattcggcggtttagccggagtcgggttaagaatgatgttctataaggagcatacgaaagaccataaggcactcgtgaaaggaatcgcctggctcacatcatctatgctgctcggattatctgttttcagcattttcgttgctgcgagagtgctgccagttgatgaagtgattcatgagaagccttggctgtgggcggtcgttatcggttttgcactgatattgccgttatctttagcggtgtccaaaataaaagaccgcaaagctggggacgaagagaatgcggataaagtgaaaaatccgattttcgcatatattggagcttcagttgttgaatggctcatggccgggaccgtcatctattttgctttgttcgctatgggcattcatgcagatatcaggtatgtgttcggggtgttcgtcattgcggcgatcggaggaatgatcagcctcgtgccgggcggcttcggctcgtttgaccttttatttttgctggggatggagcagcttggctatcatcaagaggccatcgttacttctattgtgttgtacaggctcgcctactcatttatcccatttatcttgggactgttctttgccgccggcgacctgacggaaaatacaatgaagcggctcgaaacgaacccgcgcatcgcaccggcaattgagacgacaaacgttctgcttgttgttcagcgtgcggtattagtgagaattttgcaaggctcgctttcccttattgtgttcgtagcaggtctgattgtcttggcctcagtttccttgccgattgacaggctgacggttataccgcacattccgcgcccggcgcttttgctgttcaacggcctgtccttaagctcagcgctcattctgctcattttgccgatcgagctttataaacggacaaaacgttcctacacgatggccattacagcgcttgtcggcggctttgtgttcagctttttaaaagggcttaacatcagcgcgatattcgtactgccgatgattatcgtattgcttgtgctattgaaaaaacaatttgtccgcgaacaggcatcctatacactgggacaattgatattcgctgtggcgctgtttactgtggcgctctttaactacaatctgatcgcgggctttatttgggaccggatgaagaaggtgctgcgtcacgaatatttcgtccacagcacctcgcatattacacatgcaaccatcatggcgatcatcattgtgccgctgttcttcttgatatttacagtggtctatcataagagaacgaaaccgatcggagagaaagctgaccctgagcgtcttgctgcgtttctcaatgaaaaaggcggcaacgcgctgagccatcttggttttcttggagataagcggttttatttttctagcgatggaaatgcactgcttctgtttgggaaaatcgccagaaggctggtcgtgctcggcgatccatctggccaaagagaatcattcccgctcgtgctggaagaatttctgaacgaagcgcatcagaagggattcagtgttttgttctatcaaattgaacgagaggacatggcgctgtatcacgattttggctacaacttctttaaattgggtgaggaagcatatgtagatttaaatacatttaccttgactgggaagaaaaaagccggccttcgggcaatcaataaccgctttgagcgggaggagtatactttccatgtggatcatcccccattttctgatgcgtttttggaggagctgaagcaaatctcagacgaatggctcggctcgaaaaaagagaagggattctcgctcggattttttgatccttcctatttacagaaagcgccgatcgcctatatgaaaaatgcagaaggagagatcgttgcattcgcaaatgtcatgccgatgtaccaggaaggagagatatcggtcgatctgatgcgctatcgcggcgacgctccaaatggcattatggacgcattgtttatccgtatgtttttatgggcaaaggaagagggctgtacgtcatttaatatggggatggcacccttggccaatgtcggcactgcctttacatccttctggtccgaaaggtttgccgctgtcatttttaataatgtcagatacatgtacagtttcagcggcctaagagcctttaaagaaaaatataaaccggagtggcgagggaaatacttagcgtatcggaaaaacagatctctttctgtcaccatgttcctcgttacacgtctgattggcaaaagcaaaaaagactccgtctaataagacggagtctttttttatttcgtttttaagaagtaggtttcaatatcatcaagcaggtagtttgcggctttaattccgcctgcggttgtccatacgacgtcatcgacttcatgtgcattacctgacttcacggccttcaggtttttccatagtgaactgcttgtccactgattggcccatttttcattttcttttgcattatcggctttataagtgaaataaaacagcacatcagcatccatatcaggaatagattctttactgtcggttgagaacgtaaattggtccttttgtttcttaaacagttccacttgtttttcagggcgtttgaagccaagctggtctaaaataatcccaggaaatgaatcggtataatagattcttgattcaccggataaaaagcgtacgactgaaacggttttgtttgtctggtcgcccagcttgttttttaaatcagaaacacgtttatcaaaatcggcaatgacttccttgcctttgtccgccttattcaccgcgttggcgtatagagtcaggttatccttccagttcccggccaaagattcagcaaaaacagtcggcgcaatcgcatttaactgatcataaattttttcctggcgcactttgtttccaataatcaaatcaggctttaattctgcgatggcttccacattcggttccgtttcaagaccgacgtttttaacacctttcatgtcatctttcagatagtcataccacgggtcgcccttccatgactttacggctccgaccggcttaatgccaagcgctaagagcgcctctgttccttcattagttaaaacaacaatccgttttggattggcggggatgttgtctgatgtccccattgcatgtttgaccgttcttgttttgctgcttgacacctcgctgttgcttgaactttctgaactattacaggcagaaagtaccataacggccattaaaaatacgaatagcatgctgatatgctttttcatctttttcctcccaatattgaaattcattatcatttagatcataataagcagtgttaagagtgtcaatccctaattgaggattattctcaaaaacaaacattacatagtaaataactaggagaattagatcatgatctgcaaaaaggcatcttcaaaatggattgtgttagtatgtctgattttcattttactgacggctgtctgcgcaagcgtcgtgtatggctatacaggtacgtcatggagacaggtctatcaggcgtttacttccttcaatggaacaaatgagcatgtcatcatcaaggatgtcaggcttccgcgcgctttggttgcgacagtcgtcggcgcctcgcttgcagccgcgggcgctctcatgcaggcgctcacaaaaaatccgcttgcgtcaccggggattttcgggattaacgccggtgcaggtttttttattgttgccggatcgttttttctgcatattcagtcacctcaggcattagtatggagctcgtttctgggggcagcatttaccgctgcgatcgtctatgcagcaggctcgcttgggagggaagggctgacgccaatcaaactgacgctggcgggagctgccatggcagccatgttttcttctctgacacagggcttgctgtctgtcaacgaactcgagcttgcccaggtgcttttttggctgactggctctgtgcagggccggagtctggatctgttgatgacgatgtttccatatgcagcggcagcgctggtaatctgcttctttctcggccaaaaaattaatctcctcgttatgggagaagatgtggcaaaaggactcggccaaaaaacaggcctgctgaaatttgtgatggcgctttgtgttgtcatgcttgcagggtccgctgtcgccattgccgggccgatttcttttatcggcatcattattccgcattttgcccgctttgtcgttggtaatgattatcgctgggttctgccattttccgctgttttgggtgccattttgcttgtttgcgcggatatcggtgcgcgatatatcattatgcctcaggaagttcctgtcggggtcatgaccgccatcatcggaatgcctgtgtttgtgtacatcgcaagaaggggggcgaagctatgaaacttcgttttggcgttactgcggctgaaaagaaagcatggatcgtctttttggttttactggggttaacagctgctgtactcatcataagcgctggtctcggacaaaggtttattcctccctgggatgtagcaaaaacattctttggtgcaggttccaagctggatgaactgatgatcatgtcgttccgcatgccaagaattttgacggctttatgcgccggtgtctgcttggcagcggcaggcgcgatattgcaggggctcgtcagaaaccctctcgcatctccggatattatcggaataacaggaggagcggcggtagcggtcgtgcttttaatgatgttcttctcagaccgcagcagttcacttacgatcagtctgtcatggcttccagcagccgcatttatcggcgcatcggctgtcgggctcatcgtctatttactggcatacaaaaatggcgcctccacatttcggctggtgcttatcggaatcggattttcaatgtcggcgcaggcgatgactaccctgttgatgatcaaaggcccgatttaccgagcatcacaagccaatgtgtatatcactgggtcagtttatgggtcaaactggcagcatgtaaaaatagctattatcttatctgtcattctcttattcatttgttttgtcgcgctaaaaaatatgaatatacaggtgctgggtgaagatattgcggcgggtgcaggaagcgctgtgcagcgaaatcgttttttcttgctccttttgagtacggctcttactggttgtgcagtttcagttgccggcacaatcggttttgtcgggctgatggcgccccatattgcaagacggcttgtcggctcatcttatggcgcgctgctcccagcgtcggcacttattggagctctgctcgttttaacagctgatatcgtcggcagaaccttatttgctccggtggaagtgccggccggcgtctttacagcggctatcggcgcaccttattttatttatttgctctataaaacaagaaattcttaatcgttacacccattttcttaaaaaagaaaatgggtttttttgataatgactgaagattcgtaattatttttgctatactgacagagacattgataaagaaagggcggcagatgaatgaaagaagcagaggtattaaaatatgaagcatttacaagcagtcccggcaaaggaaaccccgcaggcgtcgttttgcagggagacgattatacggaagacgagatgcagatcatagctgaacgtgccgggtattcagaaacctcctttatccgaaaaagcgagtcggccgatcttgaactccgttactttacccctggacacgaaatgaatttgtgcggtcatgcgacagttgcttctctttacgcattatgtgagaaaggaatgctggagagcggtaaaacgtacagcatccaaacgaaagcgggtatcctgcctgtgaagatttctgaaaaagatggccgcattcatatcacgcttgaacaggcctctccgcaattcaaaccatttacaggcgatcggaaaaaacttgcggacgcactgggtatcaccgatgaagattttcatgaagaccttccgattgtgtttggcagcactgggatatggacagccatcgttccgcttaaatcattggaggcttccaaaaaaatggtgccagataacaaacaatttccggaagtgttagttgatctgccaaaagcttcagtccatccgtttacctttgaaaccgtccatcccgacagcgacctgcacgggcgccacttttcatccccgtattcgggaacgattgaagaccccgtgaccggcacagcatccggcgtgatgggggcttatatgaaacattatggcaatgccgagcagcataaatttatcattgaacaagggcaggaaattggaaaagacggaaaagtggagatcgaaatgaacgaagccggcggccatgtgaaagtgaacatgacaggaacagccgtttactcagaaacccgtattcttaaaatctaatacggatgatggtttacaaaaagatgcactttccgttatcattatgaaatgataatcattttcaattgcataggaaggtgagacggtatgcctcaaaccgaacaaatacatcagcattcagtactgagggacatcatacgcagcagaagatcgattcgaaagtttaaacaagagccagtaccttcagcagtcattcttgacatgcttgaaacggcaaaatatgcgccaaatcacagagtgacagagccatggagatttatttacgtttccagtgagacaggtaaagcgaacctcattaatacatttgcagcgttctctaagaaatccaagccggatatgacagaggaaaagcttcaaaatttcaaaaacacacttgggcgcgttccgggatttctcctcgtcgtgtttcaggaagatgaaaacgaaagagcgcgggacgacgattttgcggcaacaagctcgttgattcaaaatcttcagcttctcgcttgggaaaaaggaatcggcatggtttggaaaagcggaaaaatcctttatgacaaagaagtccatcaggcctttggtttacaggataatgagcgtttcgccgccatcatacaaacaggttatcctgacgaggcgccggaagtgaaaaaacgcacaccgatccgcgaccgattcactgaaatgtaaaaaaccccttgtctcaaacggagacaaggggtttttcattaacgagatttctttttcgctctgttgtcggctgctttcgcacgctcttgcgcttcgcggtcatctgcatcagcaagctcggttgaatattcttcgtaaacgccgtcagtttccctttttaaggcatcgggaacttgtggaagcttttgtttgtttttatcacggtttttgtggatatgatttctgcccatatcaaattccccctaaaaagtgatatcaaacaaatatagtatttggttttaaggggctatgtattcctacttccgcttagcagctttttccgcttttttaaattcgcctgaataaagaacttcctgcatttttttcaggttggcgccttgctggtgcttctccctctttttttccataaaaaggacctccttcaaccatgttattcttaaggttgacgcttcctgctgtttttatacagtctttcggtccgctatcagctgtgagagtgcaaattcaagatccgaatatgtaaaacgaaatccagaggttatcgcttttttcggaagagcgcgctgtcctttcacaatcaaaagactcatttcacccaatgcttttgataaaaagaattccgggacggggagccagtgcgggcggtgcttcacccgtgcaatcgtttttccgaattgcttcatgtccacaggattgggcgcggtgacattcattgggcctgagatgccggcgttttccaccgcatatcggatcatctgggccgcatcctcgacatgaatccatgacagccactgccttcccgttccgatcgttccgccggccagaaacttataggggagaatcatgagcgggagagcgcctttttctccaagcatcacgccaaatctcgcataaactgtccggatgcccatcgcttcaatatgctgtccttccttttcccacaggtgtgcagtatggctgagaaaatcctcatctgacgttgcagaatcctctgtgaaagttttctcaaggcttgtgccgtaaatgcccacggcactggcttggatcaatgtcttcggcttctccttctgtttctgaataagccgctgcacttcacgcgtcgcattgatacggctggagagaatgtgctgcttcgttttttctgtccagcggccaaaaatcgattttcccgcaagatttatccagacatcaatatgaggaagttcctgctccggtgcggctccttccgacagccattggacatatgtcatatttttttgttcagtttcccttgcgtttcttgataaaatataaacatggtgtccctggcgggtaagaacgcctgtcagatgctggccgagaaaaccggttccgcccgtcattgcgatattcatgaacatctctcctcatcgttctaataaatatactttacctcattgtaataaaagaaaacgcgtttcaggcctgagaagggagattaagatgccgtttattacaaaaatatcaacgcaaaaaaagaatacggaacgcttcaatatttttctggatgataaatacgccttcagcgtggacgcggatgtgctcgtgaaatttgagctcaagaagggaaaagaactcgatgatcttgacatcattgagattcaatacggcgatgaagtgaagaaaggcttcaaccgtgcgcttgactttttatcctatcgaatgcggtcgacgaaagaggtcgaggatcacttaaagaaaaaagaaacctcgccccccgtcattgcggaagtcatccataggcttaacgattacaagtacttaaacgaccaggaatttgccgcagcctatgtcagcactcacaaaaaaacaaacggaaaaggccctgatgttttgttcagagagctaagagcgaagggaattgatgacgatacaattaaggaggcgctaagttccttttcctttgaagatcagacaagagaagcggtcaagcatgttgaaaagcttctcaaaaaagataaaaagctttcgacgaaagaactcaaacagcgcgcccagctgcagcttcagcgcaagggcttctcatttgatgttatcagcgcggcgatggatcagattgaatatgaaaatgatgaagacacagagaaagaagcgctgcgccttcacgcggaaaaagcgtttagaaaataccgctatgacggctcatatgaaagcgccatgaaggtcaaacaatttttattccgcaaaggattctcactcgatttaatcgagcaattactgcaggaagaggagtactgaaatggagaaacgatacagtcaaatgacaccgcatgaactcaataccgaaatcgcattactttctgaaaaagcaagaaaagccgaacagcatggaatcataaacgaactggcagtgctcgaacggaaaattacgatggcaaaagcatatttgctgaacccggaagattactcaccgggagaaacatatcgtgtggaaaacactgaggacgagtttaccatcagttatttaaatggcgttttcgcatggggatacaggacctcttcccctcagcaagaggaagcgctgccaatctcagtattgcaagaaaaagaataaagcgtaacaggaggctgatgatcagcctctttttgtttgcagcacatttacacgaattcttaaagaaaaaatcattgaattcacttgaaaaatcttttaagatgaaactcgttgttttttaaaatcaaaggaggcgatgacgttgagtatcaaaaacccatctgtaaaatttattatatttgttcttatgatttgtacattttcaatcggctatacagaatacgcggtgatgggtattttgacgtcgattgccaatgactttcatatacaggtttcatccgcagggcttcttgtcacggcttatgcggcaagcgtttgtttgacagggccgctcgtcaccatcatttccgtcaagcttccgagaaagcctgtgcttcttgggctgatggcgatatttatcctttccaacctgatgagcgcactggcgccgaattttgcggtattggccatttcaagaattttatctgcgtccattcacggcgctttcttcgcgattgccatggtattcgcaagtgaaatggttccgccggaaaagcgtgctgcagctgctgcttcaatgaacggcggactgacagtggctctaatgcttggtgttccattcggctcttatctcggagatgtcctgaattggagagcggtgttttccatcattacggcacttggtgtcatcggatttttaggccttatggctgccgtgccgaacagaaaaccaaaagtgatcccaatgcttatgaatgagtggggtgtttttaaacacaaacaagtgctgttttccttcgcgattaccattttaggctattccggtgtctttatcgcctacacctttatcgaacccattttgaggcattcagccggattcagcacggttggcattacaggtgctctctttgcgtatggattgggaggcgttgccgggaatttctttgctggaaaggtaccgctgcctttgctgactcggacgatgatcggcgtaatgatcggtttaatcggtgttctggctgtatttccttacatcgccatttacccggctgcagccattgtggcaacgttcctattcggggcatgcgcattcggcacgccgcctcttctgcaaacaaaggtcatttcctcatctgagggcggcacaaccattgccgcagctgtcagcgtatcagcatttaaccttgccaatgcccttggtgcatggatcggcggaatgattttaaacggaacaggctcttattcctggctgtttgcaggaggtgcgcttatgaccgcatgcggacttgtgctttctaccttcgcacacttatcagaaaagaagagcgtctacgaatatcaagtcaataaagggtaaaaaacagctgcagtgtatgcagctgttcttctttaccgtttgcctgaggctctcattctttcttgaggatgctgattgatagatccgtcagcacgctttgaagcatagtcgtcctttgctctcggttcaccctgaaatttgttttcgttttcgtaaggaaatcctttttctttatttcggaccatgtcatatccccctaggttcgagatcaaaaagttgcgtcttttcagatgaagacgtaaggttagtatatggagaacaccacgtaataaagcgttatttttttcctgaagaaaggagactgcacacatgaatatgtacattgagaaactgactaatctgcttctggaaaagaacgagatgatcagctatatacaggcaaaaacgtgggtggaattgttatggagcgatttcgaagcaacctacgcaaaagccggacacgcctatcaaggtgaaaaaatgactgaaaaaatcgtcacacaatggattgaaaactatggcggccagctccacctttttcaaagctcccgtaacgacgtgaatgattacttaaatcaaagcagaggccttttgcattaaaaacctgccgttaacgaccggcaggttttttcattttcttaaaattaccttaacaggaagaaatcataaacaaaacatgtttcaccagcctgtcaatcagggaataccacttatatcttgtcaaaatgcgaggaggagctttatatgaaaaagaaacaagtaatgctcgctttaacagctgccgcaggactgggtttgacagcacttcattccgctcccgcagcaaaagctgcgccccttcacgacatatctgtcagcatgccatcatccgatacttacatcataaaagcaggaaagctgaatgtccggactgagccaaatcatgaaggtgatattctcggcactgtatcatcagaacaaaaggtaaaagtcgataggttcgtaaatgccgattgggctcaaattcatttcaaaggaaagaaagcatatatttcaactcactttttaatgaaaaccgcaagccaagcgaaaacaacgaaacagacagccttctatacaccgacgcccgaaaacggaaaagctaagcagctctcatctggaacagaggtgacaatacttgggtggggattcagtgaaaacggcggatttgacttcacttgggcgttcgtggattatggcggagttaaaggctatattcacacaaaggatttacaaatgcgataaaaaggcaggccgaggcttgtctttttgcctatgcatgaaacatttcttctttctgcacgtaacaatgagaaaggagatgatgatatgacgggtttagtcggcggagggcttatgatcattgcgggcatactgatcaaactgtttcctcccaaatcgatcaacagtgtgtacggatacagaacgagacgctcaatgtcagatcaaagattatggaatgaagcgaaccgttacagtgcatcattaatgatcctgtcaggcttggtgattgcgggaatgggtttgctgctgggatcaaacttgtttattcttcagcttatcctgctgattgccgcctgtgtcataacatttatgctaacggagaaaaggctgaaaatcatgacgcacagtcaaggaggagatagaagtggacggagttaaatgccagtttgtcaatacgaacggaatcacgcttcacgttgcagccgcaggacgggaagatggcccgttaattgtcctgctccatggatttcctgagttttggtacggctggaaaaatcaaatcaaaccgcttgttgatgcgggttaccgggtcattgctcctgatcagcggggctacaatctcagtgacaaaccggaaggaattgattcgtatcggattgatacattaagagatgatatcatcgggcttattacgcaattcactgatgaaaaagcaattgtcatcggtcatgactggggaggagctgtcgcatggcatttggcttccacacgcccggaatatcttgaaaaactgatcgcgatcaatatcccgcacccgcacgtcatgaaaaccgtaacgccgctttatccgccgcaatggctgaaaagctcgtatatcgcatacttccagctgcccgatataccggaggcatcactaagggaaaatgattatgatacattagacaaagcgattggattatccgaccgtcccgcgctttttacatccgaggatgtcagcaggtacaaagaagcgtggaagcagccgggcgcgctgacagctatgctgaactggtacagagccctcagaaaaggaagcttggcagagaaaccctcttacgaaacagtaccttaccgaatgatctggggaatggaagaccgctttttgagcagaaagcttgcgaaagagacggaaaggcattgcccgaatggacatctcatctttgttgatgaagcttcccattggattaaccacgaaaagccagccatcgtcaatcagctgattttggaatatcttaagaaccaataagctaaaatttctctccatccgtctgtcataatggcagactttttctgtgcgttttttttcatagtctgttttaaacatgacaaaataacattaaaaatcatgaatgtcaccataaaattgtaacaaaaaacaggtttaaacgactttaaaaaaaggaatagccttactgaagatttgtgtaaaactcccctaaggcaatacttaaaaagaataataaaaagaaggtgccttaatgaagcaaggattaatctcgattattatcccgtcttacaatgaagggtataatgttaaactcattcatgaatctttaaaaaaggaatttaaaaacattcattatgactatgaaatattcttcataaacgacggaagtgttgatgacacgcttcagcagatcaaagacttggcagcgacgtgcagccgggtaaaatatatatctttttctcgaaactttggaaaagaagccgcaattttggcgggctttgagcatgttcagggcgaggcggttattgtcatggatgccgatctgcagcatccgacatatttgctgaaggaatttatcaaaggctacgaagaagggtatgaccaagtcattgcccaaaggaacagaaaaggggacagctttgtccgctcactcttatcatctatgtattacaagttcattaataaagcggtggaagtcgatttgcgtgacggtgtcggtgacttcagattgttaagccgccaagctgtgaatgcacttttgaagctgagcgaaggaaaccgcttctcaaaaggccttttttgctggattggctttgatcagaaaattgtattttatgaaaatgtcgaacgaaaaaacggcacctccaaatggtcgttcagcagtctgtttaactacggaatggacggcgtcgtttcatttaatcataagccgctgagattatgtttttatacaggcattttcatcctgctgctttccatcatttatatcattgccacattcgttaaaattctgactaacggtatttctgtgcctgggtatttcaccattatctcagcagtgttatttctcggcggagtacagctgttaagtcttggaataataggtgaatatatcggccgaatctattatgaaacaaaaaaacgcccgcattatttgatcaaagaggcgaatatcccgaacaaagacctgcctgaaacgaacgaattaaaaagcatgcggcgtctgacaaaaatgcactgaaaataccaagcgccattggcagtgctttttttgcgtgtctattatcttaaaagcaagactggagaattcatatgaaaagaaaacatatcatgatctatgcggccagtttgctggtgtccgttctggcacacgctttttttgtgaaagaatgggcggaaggcaggtatatgacaggtccgggtgacgggcttgcgcaaatgatcgtatttaaaaaattattatttgaccaatatacacacgggaattttttctacaattattcattcggacttggcggcggcacattcagtcagctcggctattatttttctgcgtcttttctttttcttgctgtgtctgccgctgtttggctgcttcaagccgtccagctgatcggagaaacggatacgcttttttgggcagagtcagctgtttttatcagtattttcaaattgagcttgatcatctttacgtccgcttctgtttttcattatcttcttaagcacagggcggcatcgttcacgggagccgtgttatacggcgtctcaattatttatttccgtcacgaagcgtattgggaatttttcaccgatacaatggtttggcttccgctgcttgtgcttggcgcagaaaaaattattagagagcggcgtccggcgtggtttatcgttgcgtgttcgctgacgttaatcaacaatttttactttgcatacataaaccttatattcatcggaatctatgtgctgttcagatggctgatccgtttggaaccacatgaagagaaaagatggattcaaatcagattatttctcgtttcaggcttcatttcttttggcatcagtgcggcggcgtttgtgccggtagtatacggttttttaaacaacctgcgccctccatacagccagaaaatagagtggctcaatttcgatgataatatcttattttcgagccggatcatcattgtgccggccgcttttctgctgtttttgtttattatttctttttacaaaaaccgtgtgtttcgtctctttgccgggttgagcctgctgtttattctgtttcatttcagtccgtatgcggcaagcgtctttaacggtttttccgccccgcaaaaccggtttgaatatgttctggcctttaccattgcgggagcagctgcggctggtttgtcacagctgtctgaattgaaacggaaagaactgctcccggccgcagctgtcgtcctgcttctttacttgtatcatatccaaaggtataagctcgatatatggaagcctgcgaatgaaagtattctattgctcttactcatgacaatcgcagccttgtttgctgcagcttttgcgaaaaaacgggcaaaaatggctgtgtacggtataatcattctttcttcgctgtttgtcgccaactcctatcaaaaatacgcgctctcagaaggcggcgatttggacagtgtgacaaaagaatatcttacaagtgaggaatacagagggcgggaatcatctgagctcatcagacgtttacagaaggaagacgatgacccgctcatgagaatcgactggatgaacggggtccgcaataatacgccaatcatttacggatttaatggcttcagcgcgtattccagcattttaaacaaagatctgctggccttctattggaatgatttaagcatcgatatgggcagggaaagcgtcagccgttacgcgtcattgggagacagggcgaatttatacagcctgctttacggcaaatattatatgaccgaaaaaacaaacgaagccagcgtcccgtacggcttcaaaaagcatttagaaacagagcattatgcagtttatgagaatcagtacatgcttccattcgttaaaacagcggatgccatatacagcgaaagtgagctggaccgattgcccgctcttgcgaaagaacaggcgatgctgaaaggaattatattaaaagatccatcaggaaaaacggagcagacaccaaaaccgtccaatttgatcaccaagtcggacatcaccgcaaaacaagcccagtatcaaaacgggctgctaaccgtaactggagaaaacggaggagagctgatcatcaccccgaaacagccatcatccgctccgggagactactatgtcagcttttatttgaaaagcaaagcaaaagacaaaggatttacattaaaggtaaatgattatgtcacaacaaggaaatcgaacaaatcgatctataaaaccggagtaaataatataacggtaagagtgcctaaatcaggccatatctcaatcaatcttccgaaaggaacctatgagctgagaaacatagcgctctatgaagaaaattaccaaacgctgaaaaacgctgtaatgcaaaataaaacagagaaagcagacaaactgaattggaacaaaaatcgactgaccttttcctatcatctgtcaaaagaccagtacatcatgcttccgatcccatatgaaaaaggctgggagctgaagatcaacggaaaaacacagaagatcgaaaaagcggattatgcttttataggcttcaaggcgcaaaagggagacaatcacattgagctgacttactatccgccatacttcaaaatatcggcgatcatatctctcgtcagtctgctgcttgctgttttttatataagacgtaaaaagcccggctctatatagagccgagctttaattttttctgaagtttttcttcgctgaatatccatcccgtataggatgaacgaatcgtgagatcatggccgatatgaacaattgcgacaaacggataatggcctttgctccgataacgcaggtcgataaatctcacctcataatgatctttaaacgtatccacttcccaccggtataccggagaaaaggacagaaacgccgcgatgttatcatcctgctttgccgcatgcattacatcggtttcaggaacaggcacccgattaaatgtatccagaatcacgacatgtccttccatgcttcttcctacatagaaagcatgtgctgtcgtcactgcgattcgccattgcctgaatttcatcgttggagaaataataatgctttcgatctcatcatgaatcatctcatgaagcttccgtttaattctcagctgcatgatcaggcgcaccaagtagtagcctaccaatatgatatataagctgagaaacgtgatgccgggactcccgcctgcataccaaatcgcgatagctgccagatggctgataaaaataaacggatcaaacgtattaatcagcccgagcgcaacccattttttcgaaaacggacgaatggcttgtgttccataggcgttgaatatatcaacaaagacatgcagaacgactgccagcagtgtccacagccacaggtgcagaaaatcggcctgaggataaaataaatacagaatcgccgggatgatgacagaccaaaacaaaacggcgggaattgaatgggtaaatcctctgtgattccttatataaacagcattgtttttaagctttaacacagtatcaatatccggagcctgagagcccgcaagcgttgcgatcataacagcgtgagccattgccggatctgatccgacaacaggatcaagcgtcgcaataccgcccagtgcgatgcccataacgacatgtgtgcccgtatccataggtgacctccttgcagggtgatcctgcacattcactttgtaagaaattccccattttcatatacccaatttttaaactgattcaatcgttctcatatgtttccgctttttctttattactatttaatgtaacatattatcgtactgtgcccttagtgtacaacaaaaaacagtctaaagaaaagcggggcgcgaaagactggggagaaacacatatgaacgtacttgaagacaaattaaaacaaaaagacatacagcaatttcgcgatgatttaatctcatggtttgaacgagagcagcgcgttttgccgtggagagaggaccaagatccatataaggtgtgggtatctgaagtgatgctgcagcaaacgagagtagagacagtgattccttactttctccggtttgtagaacaattcccgacagtggaagcgctcgctgatgctgatgaagaaaaggtgctgaaagcatgggaagggctcggctattattcgcgagtcagaaacctgcaaagcgcggtaaaagaagtgaaacaggaatacggcggcattgttcctccagacgagaaagattttggcgggttaaaaggcgtcggcccttatacaaagggagcggtgctcagcattgcctacaataaacccattcccgcggttgacggaaatgtgatgcgtgtcatgtccaggattctatctatttgggatgatattgccaaaccaaaaacaagaacgatctttgaagacgccatacgagcttttatttccaaagaaaaaccatctgaatttaatcagggcttgatggagcttggagccttgatctgtacgccaaaatcaccctcatgcctgctttgcccggttcagcagcattgctcagcatttgaagaaggcactgaacgggagcttccggtaaaaagcaaaaagaaaaagcccgggatcaaaaccatggccgcgatcgtactgactgatgaagacggacaagtgtatatccacaaacggccgtctaaaggtttgctcgccaacctgtgggaattcccgaatcttgaaacacaaaaagggatcaaaactgagcgtgaacagctcattgctttcttagaaaacgaatatggcatacaagctgatatcagtgatctgcaaggtgtagtcgagcatgttttcacccacctggtatggaatatttcagtgtttttcggtaaagtaaaacaagtgtcggataccagcaagctgaaaaaagtaacgaaagaagagctcgaacaatttgcgttcccggtgtcacatcaaaaaatctggaagatggcaggagaagcagccgccatctcggctgctccgtaaaccattcttaatcgtaagagacgcgcgtgccgtggctgtagtccgcttcattgcgcttcattccgccgcgcgcttcaatttcttgcgttaattcccggtattttgattggccttcttcgttcaaataaggcataatttgctgaaaggcatgatgaaaataagcgagttcactgttcttccaatcttttttggaaaccatgttcaattcgctcatatcacgtccgacatacataacagaagaccccctttaaagttcttgccattattgtttgtggaaataaaagaactatacgctacaaggagatgaggaaaaatggaacaaaataaatgtgcactcgtaacaggaagcagccgcggtgtcggaaaagcggccgcgatcagacttgctgagaacggctataacatcgtcattaactatgcacgcagcaaaaaagcagcattagaaacagcggaagaaatcgaaaagcttggcgttaaagtgcttgtcgtaaaagcaaacgtaggacagcctgcaaaaatcaaagaaatgtttcagcaaattgatgaaacgttcggcagacttgatgtttttgtcaataatgccgcttcaggagtactaagacctgtcatggaattagaagaaacacactgggactggacgatgaacattaatgcgaaagcattgcttttctgcgctcaggaagctgccaagctaatggagaagaacggtggcgggcatattgtcagcattagttcattaggctctatccgctatcttgaaaactacaccacggtcggtgtatcaaaagcagcgttagaggctttaacccgttatcttgccgttgagctttcaccaaaacaaattatcgtcaatgctgtttcaggcggagcgatcgacacagatgcgctgaagcacttcccgaatagagaagatctgcttgaggatgcgcgccaaaatacgccggcgggacgcatggtcgaaattaaagacatggttgatactgtggagtttctagtgtcttccaaggctgacatgatccgcggacagacaattatcgttgacggcggacgctcactgctcgtttaaaaatttttaaaaaagaggaatagctatacgatcacctgcacattctaatgaccgtggaggtgataacaatggctaactcaaataacttcagcaaaacaaacgctcaacaagttagaaaacaaaaccaacaatcagctgctggtcaaggtcaatttggcactgaatttgctagcgaaacaaacgctcagcaagtcagaaaacaaaaccagcaatcagctggacaacaaggtcaattcggcactgaattcgctagtgaaactgacgcacagcaggtaagacagcaaaaccaatctgctgaacaaaacaaacaacaaaacagctaatcactgaaacagaaaaaagcacttcatcttcgggtggaagtgcttttttctgtttgaaaaacgacaaaacttgtggaaggtctacagaatgagtcaaagggtttgctttatggagatcgaaatgattaaaggaggaaatgtttatactttcatcaggctgaaggaggaaccgatgaccgaatttgaaaagctggtaagtgaacagatgaaaacgatggataagcttctcgatctccaatcagagctcgaccgctgcaaacaaattgaggcggaactccggcatttggaaagggatgcaaggctgcgtgggattcaggctgaaattgcggtaaaacggaaacaccttgccgatatacaggatatgtttcaaaagcagacagagcaggtcattcgttcatatcgcagctcagaaaagccgtcttcctttgtgtagtgcaggaatgtgccattccccggccggaatggctcttttattttcatttttcaatttgtaacgttataataggtaaaagacgttgtcggtaagcaaatttggacatactaactgtagggctttatagaaagtaggggagaaatatgggctatcccaaggaaggagaaaccattcaaattcacagctataagcacaacgggctgattcatagaatttggaatgagacaacaatcttaaaaagtacagaaatgtgtgtcatcggagccaatgaccggacgatggtaaccgaatcagacggccggacatggataaccagagagcccgcaatctgttattttcacgcaagacaatggtttaatgtcatcgggatgctgagggaagacggggttcattattattgcaacatcagttctccgtttgcctatgatggcgaagcaattaaatatattgattatgacttagatgttaaggtttttcctgacatgacctacaatattctcgatgaagacgaatatgatgatcatcggaaagccatgaattatccaaaagaaatcgacagtattttaagagactacttaaatacgctgctccattggattcaccagcgtcagggaccgtttgcgcccgagtttgtcgatatgtggtatgaacggtatttgcgctatacaaaataatggttacgtaaaaacctgttgcggggtacaacaggtttttcacatgggctcacacacatcatgataaagagagagggggaatcaaccgtgggggttatgaaacgctacatgcaattcgtcaaaccttataagaagcaaattttcgttacagtgttaatcgggatcgtaaaattctccattccgcttgctctcccattgcttctgaagtacgtagttgacgacattattcaaggaggcggcacggccagtgacaaaaccacgtcattgttcacgattatggcgatcatgttcgccttatttttaattttgcgcccgcctgttgaatattaccggcaatattttgcccagtggactgccagcaaggtgctttatgatataagagctaagctgtttgaccatatacaaaaactgagccttcgtttttacgcgaatacaagaacaggggaagtcatttcccgagtgattaatgatgtagaacaaacaaaggatttcgtcatcacagggctgatgaatatatggctcgatatgctgacgattttgattgtaatctctatcatgctcacactggacgttaaattaacgctgatctctatcgttttattcccattatacggaatatcagtgaagtatttttacggccgtttacgaaagctgacaagggagcgctcacaggctcttgctcaagtgcaggggcatttgcatgaacgcattcaaggcatgcctgtcatcagaagctttgcgatagaagatcatgaacaggctcaatttaatgagaaaaacggtcatttcttagataaagccatccgccacacgaattggaacgcgaaaacctttgcggtcgttaataccattacagatttggcgccgctcatcgtcatagcgtgcgccgggtattttgtcattaatggaccgctgacagtcggaacaatggtcgcgtttgtcggatatattgacagaatgtacaaccctgttagaaggctgatcaattcctctacaactttgacacagtcaatcgcatcaatggacagggtgtttgaatttattgacgagccctatgaactcactgacaaaccaaatgcgataaaggccgatcagattcgcggaggagtggagtttcaaaacgtttcgtttcaatatgagaaggacaaagaaaatattcttcatgatgtatccttaaaagtaaatagaggagaaactgtagctctcgtcggcatgagcggaggaggaaaatcaacgctcgtcagcctgatcccaagattttatgatgtaacaagcggcagactgctgattgatgggacggatattcgcgattatgaagcaagaagccttcgcaaccaggttggtatggtgcttcaagatacctttttatttagtgaaacgattcgggaaaatatcgcgatcggcaagcctgatgccacacttgaagagataatcgaagccgccaaagctgcaaatgcccatgaatttatcatgagttttccagaaggatatgagacccgggtgggggaacgaggcgttaagctttcaggcggacaaaagcagcggatctcaattgcgcgggtattcctgaaaaatccgccgctcctcattttagatgaagctacatcagctctggatttggaaagtgagcattacattcaagaagcgatggacaaactggcgaaggatagaacaacttttgttgtcgcccaccgtttatcgacaatcacccatgcggataagattgttgtcatggaaaacgggacaatcattgaaatcggaacccatgatgaactcatggactatgagagccaatacaagcacttatttaccattcaaaatttgaactaaaacatcaatcttatatccttttaacgaaggatataagatttttttgtatataaaaaaacccggctgtttaaccgggttactcttctgtttctatttcgcagtctttcggatgatacgtttgaaaacttgtgataagtgtttctaaatgttcaagctgctcgcgatattccacggcgcttgccataatattgagcatgttgtaatcaataagctcctcatccgtattctgctgattttttaaaaatgactttgttaaaagctgcttataccggatgccttcttcaaccgcgtcatcatgcggcttgatttttccgacaaacctcatcaaaatccgctcgtgccagtaaagcaggtaatcaagttcttcagtcaatgtttcctgaaactcttccggcatatgatagatctcgttttccagacgatgcagcttcttcaatgtatcaagcgcccgatttgcagtaataatggcctgtctgaacaggacaagctttcttgatttcacataagtcgttttcttaaagtaacttctttcttctttatatagaagatatgtctgatcaagcttgatcattttttctttcagtttttcaatatcctctttcaaaatcgaatgctctgtcgactgccgcatggacaatctgatccacttcataatttcttcggtgttttcgacggtattatgaatcagctttgtttcgtacttaggaggcaaaaacacaaggttgacgataaaggaagaaagcacccctaagatgactgtgcttgttctgatcagcgcgaacattaaaaagtcgtcaccggcagattctaatatcgcaatgactgttacaagagcaattgaaattgtatgttcaattttaagtttcagcatgattgtaatgacaataactgctgttaacccgatcataatcgggctgggtccgaaaataaggccgaacactgtggcaatcacagctccgatgatatttgcttgaacctggtcaataataatgagaaaagagcggtaaatcgacggctggatcgcaaatatcgctgcaattccagcgaaaatcggcgcgggaagcccgatccacgaagccaaataaagggcaagtgtaatcgcaatcccggttttgaaaatgcgggcaccaagtttcattggtttgtgcgtgcattcctttctatagtaaattgtgtgacatagcaaatgggctaatccttaaaattcccggttagtttatttgctaaacaattaagtaatatacagggatcgatacaaatattcaagctatttttctagaaaaagaccaaaatcttacacgctgtttgattccataaaaaaacaggagctcaaagctcctgttcaaggtatttgattctagttttttagatgtttaaatgcatcctcgaccgctgtaagcgtgtctttaatatcctgctctgtatgtgctgtggtaataaaccaagcttcatacttagaaggtgctaaattaattccgcgttccagcatcagcttgaaaaacgtagagaatgtttctccgtcactccgttcagcctgctcgtaattttccactttctcatcagagaagtataccgtgagcgcaccttttaaccggttgaccgtaatggtgatgccgtgtgtttctgcgtgcttcaaaatgccttcctcaagcatagcgccaaggtgatcaagcttttcatacacgcctttttctttgagcacttccagacaagcgatgcctgataggatggaagcggggttccctgccattgttcctgcctgataagcaggccctagcggagctacctgctccatgatttcttgtttgccgccataggccccaatcggaagtccgccgccgataattttcccgagtgctgttaaatctggtttcacctgtaagagatcctgcgcgccgccatacataaagcggaaagccgtaatgacttcatcgtaaataacgagagcccctgcattatgtgttaattcatttacttgttctaagaagccctctttcggctccacgataccgaagttgccgacaatcggttcaacgagaaccgccgcgatttcactgccccatttttcaagagctgctttatagctatcgatatcattaaatggtactgtgatcacttcgtttgcaatgcttttcggtacaccggctgagtctggtgtgccgagagtagacgggccggagcctgcggcgacaagcacaaggtccgaatgcccgtgatagcagcccgcaaatttaatgatttttgtccggcctgtatatgcgcgagccacgcggatggtcgtcataacggcttctgtacccgaattgacgaatcttactttgtccatagcgggaatggcttctttgagcatttttgcaaatgtaacctcgtgtttcgttggtgttccatacaatacaccgttctctgctgcttttttaatcgcttctgtaatatgcggatgggcatgtcctgtaataatcggaccgtacgccgctaaataatcgatgtatttgttgccgtccacatcccaaaaataagcgccgcttgctttctccattgcaacaggagaaccgccgccgactgctttatatgatctagacgggctgtttacaccgccgacaatgtgctgtaatgcctcattgtgaagttcaattgattttgtatgcaagaataaaaacctcctatatctccatgcgtcctttctattgtagcatgcttccgaacaagaacaatggcttcgggcttcagattcagctgagatggttgtaatctggacaagaattggatacgcttaataaaaaaacatccggaggtaacgtaatgactatagaaatcggacaaaaagcgcctgatcttgagttaaaaggtgatcatggggaaacagtaaaattatcggattataaaggaaagtacatcgtgctttatttttatccaaaggacatgacaccgggatgtacaactgaagcatgcgattttcgggacagtcacgaaagcttcgccgaactggatgccgtcattatcggcgtcagcccggacagccaggaaaaacacggaaaatttaaagagaagcataaccttccatttctgcttcttgttgatgacgagcataagctggcggaagcatttgatgtgtggaagctgaagaaaaacttcggaaaagagtatatgggaatcgagcgttccacttttttaattgataaagaaggccggctcattaaagaatggagaaaagtaaaagtaaaggaccatgtagccgaagcgcttcaaaccctcaaagatatgtctgaaaagtaaatctctatgagcctatgcttacttttaccctgatatcaattgacaaattatcgtagaaagagttacactaattataaacattacaatgtaagaattttttttagaagagaggtgcatgacggatggctgcacatgaactaaaagaagccttagaaacgttgaaggaaaccggagttcgcattactcctcaacgtcatgcgattctggaatatctcgttaactctatggctcatccaacagcggacgatatatataaagctctggaagggaaatttcctaacatgagcgtagcgacggtatataacaatttgcgtgtgttccgggaatcaggtttggtaaaagagctcacatacggtgatgcttccagcagattcgattttgtcacatccgatcactatcacgcgatttgcgaaaactgcggtaaaattgtggacttccactacccgggccttgatgaagtggagcagctcgctgcccacgtcacgggcttcaaggtaagccaccaccgtttagaaatttacggcgtctgccaagagtgttcgaaaaaagaaaatcattaaaaataagctgaccgcacgaaacggtcagcttattttatttcgacattttctttttattataagactcatcaaattcttttccttctaatcccttatctaaagtcagcggctctcggcaatgcatgcacatatcgactactcctaaaacctttgtctctttatcacagcctggacaaatgacgcgaaccgctttagtcgaaagcattccgatccaaaagtaaactaccgtgctgagaccgatggataaaagcccaagtatcataaacaaactagaaagcaaaactgactctttgaaaaagatcccgatgtacataatgataaacccaacgaaaaccaaacttaacgcaaatgttctgattttattaattttgctggagtatttcgccatgtccatccccctctgttttaactatagcacaaacccgatgggattttcttcatgttttcggttgaactggaatttacatatggagagttactgtgaaattgtttataatagttcaatgtgtttagaaaaaaggaatttcgttttaaccatagaattgaatcaaatagagaataaaaaaatttgaacaattgcattggaggaatagtgatggaaaatcttctccgtccaatttaccaagaaagagcaagtcaccccaatacattggctgtcattatgattgagagaagaaacaaaacatcttccttaacagataactttgatgcagctttgctggtgattgtaaaggatgctgatgagccagtttttataaagcattatgaatttgatcatcaaacagcttctttgcatgtggtaacagattctcagattcaagaatggattttgcttggaacaaatagaagaatcatagattggattgtaaatggcagagtcttgtttgaccgtaatgaatacgtagttgaactgattgacaggctgaatacatttccgtttgccgaacgtaaactgaagatcggactcgaatacggcaaattaatcagaaggtatgttgaagggaaagctttttttgaagccaatcaatttttagatgcctacaatgccgttgttcatgcgctgcatcatttagcacgtattgaagtaatcgacagaggattccatcccgaaaccacggtgtggagccaagtgcgccagatggagccccaagtgtacaaattatattccgagctgattgaaagtcatgagagcctggaaaaaagacttgaattattattcttagcaaatgattttctcatccattccaaagccgagatcggttcggcgcatcttttcgaagtaatgaaagaaaaagacatttggcaattcggtgagcttcttcaacatcatgacctaaagcactttacccaagatcttggcgttatgcttgattacttgacggaaaagggacttatcaacgtctgccagatagaaacgaaaggacaggctgtctatcaccgaggatattcttttaaaaaaggtgttgactctgattcttgaccgtgttatattattaaacgtcgctgatgcgcttctgagaaaacaagctcacagcggcgggaaaataaatcaaaaaaacatttgacaaaagaaagtcaaaatgttatattaataaagtcgcttcaacaagaagtgaaaatgatctttgaaaactaaacaagacaaaacgtacctgttaattcagtttttaaacgcgagacggtttgccttcgcattcagctcgccgtacgtccaagactggccgttgtatgtgacagccgggcggtctttgtggcgctgggcagtctcttcgaatagctgatgaaccgttttgtctgtcggcacaggcagcgctttgcccttccatgcctcaagaagcgcttgcttttctgtctcggtgaccagtgacaggctggaaagcggctggttcgggttcccagtaactgcatctaaaagctccatccaatattgcttccatcgttcaatcgtttcctgcttaaacagagctgtattgtattcgagtacgaatgtaagccctccgtcggtttcgtcagccgtcagcgtgaggtcaaacttggctgttttccgttcaaacggatgcggctcaagctgaatccctttcattgttaaatcctttatattcgcattttgcattgaaaaaactgcatcgaataacggatttctgcttgtgtcacgctgaacctgaacatttccgatcaaatcctcaagtgggtaatcctgcgcatcaaaagcgctgagtgccgtttctttcacttcgttaagatagtcagcaaacgtcttttcacccttcggatacgtgcgcagcgccaatgtattgacgaacattccgatgacgcggctgacgtccgcttgagatcgtccggccacaggtgaaccgacgatgatatcgtcttgcccgctaatttttgataaaaacgcactgtatgaagccagaagcaccatgtaaagcgtggaatccgtttcttttgcaagcctgcgcagagcatcagctttgcctgcttctaatgaaaatgcaatgcggtctccctcaaatgtttgaacggcaggccgactgtaatcagtcggaagcgtcagcaccggcagctctccgtccagctccttcagccaatgctcttcttgcttcttgtaaagctcagactgaatgaactgctgctgccacacggcataatccttatattgaatacggagcggctcaagggtttctccgtcgtacagctttgaaagctcctcaatcagcacaccgacagatgcaccatcagaaataatatgatgcatatcgaacagcagcacatgctcagtgtctgaatgcttgataagccctattctgaacagtggaagttggtcgattttgaaaggcttaataaactcagaaacgatccgctctgtctcttcttccggggcttcgaaataggctatctcgcactcagcctcttcccagatccgctgcaccgtttctccatcttttatttcaaacgtggttctcaaggcttcatgacgctgcattaactgctgcatgacgctgttaagcctttcaacatcaagctcacctgtcaggcgcagaaccgccggcatgttatagctcgtttgcgcatcctcaagctgctgaagcacgtacatccgtttttgcggtgaagaaacaggatacgtatcttgtttctctgccgggctgatacttgcggctgtccctttttcagcagaggcaatcacctgtgccaagccctcaaccgtcggtgactggaagagatccttgagtgacagctcaacgcccagttcctgatgaaccaaggcaagcatcttcatgcctgctaatgaatgtccgccaatgtcaaagaagtggtcataagcgccgacttgttctgcctgaagtacctgtgcccaaatgtccgcgactttttgttccgttccattgcgtggcgcaacatatgaaacacctcttgaaacgttggcatcaggaatcggcagcgctctccggtcaatttttccgttccctgtcagcggcagctcgtccatttggataaacaccgcaggaaccatatatgccggcaagtccttcgcagcatgctctctcatctcttgtgatgagatgtctccttctccgacatagtaagcacacaacagtttatctcccgctccttgatcaacggcaagcacaacactttcctgaacacgatcatgggtttgcagctgatgttcgatttctccaagctcgatgcgctgtccgcgaatcttcacctgatggtcgattcgcccgataaattcgatgtcgccattcggcagccatctcgcaaggtctcccgttttatacatgcgttcgccggatgtaaacggatggggaacaaatttctcctcagtcagttctggacggttgtaatagcctttcacgagtccttcgccgctgacgcaaagctctccggcaatcccggcaggctgcacgtgtcccgtacggtcaagaatgtatacttccgtattgctgaccggttttccaatcggaacagacagcgtgtgctcctccaattcatcaaccggatgatacgtcgcgaaaaccgtgctttcagacggtccatacatatgaaggagcttgccctttccaaccgtttgcaaagcttttctgacatgctcaaccgaagcccgttccccgccaaacataatcttgcgaagcgttgacaagcatgccggattcaagtccacaagcaagtggaacaaagcggttgtaatcatgagaatgctgatgttctcccgttcaatgacgcgggacaggcgagccatgtccaaaacggtttccttcggtatcagcaccagcttggctccgtttaacaaagagccgaacatatcgaacataaacgcgtcaaacacgtaattggaaagaccgagaatcgtatcctgttctgtaatgctgagataattcgtttccttcaccgtgcggagaatattggcatgtgtcacgatattccccttaggtgttccagtcgttccggaagtatacgtcaggttggccattgctgcagaatcaagaggcagtgcgagatttcgcgcatcggcatgatagctttcttcctcatcggctagcacgataacgcccttaaattccgcttcttccgccaaagcctttaatttcctctgagtgagaagcacctttgctccgctgtcacggaagaaatgctgcatccgctgaatcggatgttccggatcgatcggaacataagccgaacctgattttaatactgccaagatcgacacaatcatatccattgaccgctcgcataagacagccgcagttctgccttcgccagctccaagagaaagaatgccgcgggctaaacgattggcccgttcattcagttcacgataagtgagtgattcgccttcatattgaagcgcagtgtggtctggcgtattcgccgcttgctcctcaaacagctgaacaattgttttatctttcggataaggtgttctgcccgggttaaactgctgaatttgcgaagcagcctcctcttcagaaagaagcttatactcagaaatcggcttctctggatcagccgcagcatcttcaagcaaacgcgcaaaatgcgtaagcagcctgtctgccgtgctttgtttaaacagctttgtgctgtaatccacatcaatctcaatgccttcatcggtttctctcgcctgcaccgtcaaatcaaatttggcaatcttgaaattggtctcttgaacagacaaggaaagatcgccgacagccggaatgccctctgtcgcgttttgaaggctgaacatcgtgtcaaacagcggatgcctgctaacatcacgcgggatgttcaaatcttcaacaagccactcaaacggatagtcctgatgagaaaaggcatccagcacccgtttgcggacacgcgagatcaattgggtaaacgtctcattctgcttcacctcactgcgaatcgcaagcgtattgacgaacatcccgataatgccctctgtatcggagtgatttctgcccgctgacggtgtcccgacaatgatgtcatcctgccccgtatactttgacaaaagcgtatagtaagcggaaagcatcaccatatataaagtggcgccgttttgttcagccaaacgattgaggcgatcctttacccccgcatccagcttgattgacacccgatccccttcaaagctttgaacaggtggtcttgggtaatcggacagaagctgaagcaccgggagctcgcctgcaaagacttccttccaataagcctggtccttcttgtacccttcagcagcctgtctgctttgccatacagcgtagtccttatactggagacgaagatcaggaagctgttcgcctttataaatgcgtgctaactcctccagcataatgccaatggatacaccgtcagaaatcaaatggtgcatgtcaaacagcagcatatgacggttctcttcaagccccagcaaaccgattctgaacagcggagctttcgccaaatcaaatgtccgaacgaatgaagccataattgcctcatctgagcggccgcctctttcaatcatttcgatgttgaaatcaacgctatcgtgaattttctgtctcggcgtgctgttttcaagaacaaatgatgttctcaatgactcgtggcgtcggattaatccctgaaatgcgcgctccagcttttgaatatctaaaggcccttccagaattgctgctgctggcatgttatagccgactcccgcatcctcgaactggctgacgatatatgttcgctgctgtgccaatgaaagcgggtaatgctcctgtttttcagcaggttcaatcaccgcaaaagctttgctttctctgtgatcagcttcctctgcaagagccgtaatcgtcggatgctcaaacaaaaattgaagcggaatctcaatgcctgtttccttatgaatctttgttaaaagggtcatggcttttaatgaatgtccgccagtttcaaagaaattgtcaaagatccccgccttctcaacgttcagcacgtcctgccaaatggctgcgattgctttttcagtctcatttcgcggcgctgtataggcagtgccgctgacagccttcacctctagtgcaaacagcttgcggcggtcgactttgccgcttggtgtaagcggaatttctgtcacttctgtaaagtaagccggcaccatatagtcaggaagctgtctggccgcatgctccctcaaaccggctggcgcaaattcgcttccaggcttctgcacaacatatgcgcaaacctcaagatttccctgttcgtcagggcgtgccaaaacaacggcttttgcaacgtctggcgcctgctgaatcacggcttcaatttccccaagctcaatccggtatccgcggactttgacctggtcatcctctctgcctaaatattcgattgttccatctggaagccagcgcaccacgtccccggtccggtacatgcgatcgcccggcacgaatggatcttgtaaaaacttctcttccgttaattcaggcaaatgtaaatagcctcggcccacaccgtctcccgcgatataaagctcacccgccacgccttcaggctgcagccggcctttttgatccaaaatatataagcggttattccccagcgctttcccgatcggcacatacgctgattgaactgcattctcagggataaccggatgaacagacgcgtcaacgcacgtttcagtcggcccgtacacattagtcaaacgcggcgctgtgccggcttctttaaacagcttcagcagcttgtccgcaacaacagatgacaggccttctcctccgatcagcatgtgcttcagttttaggccttcaaaatcgcctgctgctgccagcatttgcaaatgagccggtgttccgtccgtcgcctcaatgctgttcttccgataatatgcagtaagggcggccccgttcgtcactgttttcttcggtacgatataaagggtttggcccaaaagaagcgacgcgaagatctgcttcactgacgcatcaaagtggaacggcgcaagcaatgccatccgcagggtttggctgccgctttgataaatcgtctgctgcagagattcaaccaaatgatgaacctggcgatgctcgatcataacgcctttcgggcgtccggttgttcccgatgtgtaaataatgtaggcaaggttccgagcgttcacatctgcattcaggctttcttctgcaccttcctcaatcgcctgatctaagtcaatcagctcagcatcggcttcaggcgccgcaaccttcgattcagtcaggatgaaatccgccccgcagtcctccaaaatatattgaatgcgctcagcaggaaaacccggatcaatcggcacataggctccgccggcttttaaaattcccatgatagctgtaatcatccgttcagagcgttcaatcaaaaccgcgacaggactgtccgggccaacccctttctgtttcagcacattggcgatgcgtgcagattgctcatgtaacgttcgataggacaatgtgcgatcttcaaatacaaccgctggatgatcagaaagcagttcagccttttcttggaacagctctggtatcgtcatgtccttacggtagctcacagatttaccgccggccctcgcaagcagcttctctttctccgcatcagaaatcagtgttaattcatcaattgtatgttctggatgcgttaacgcgttctccagcatggtaatcatgcgctcacaaatcatgttgatttcttcacgtgaaaataaatcagtgcggtaatcaaaatctatggtgagtttcccagtatcccatcgatcctttacatgaattgagacatcatttaatccgctgccgctgaaaatcggctcagtcaaaaaggcaagatcctcttctttctgccactgcatcacttgatattcaagagaaaccgtgaacagcttggtcagagagctctttgtttcacgcaaatcgttgattaggagattatacggatacttttggtggcgaagtgtcttcatcagatccttcatccggtctttgacaaattctgaaaacgcctgcccgccgtcaatgtttgtccgaagcggaaccgtagaaacaaacatgccaagcatctgcttctctttcgcatttgtccggttgcccataaatgttcccgtcacaacatcattctggccgctgaccctgtacaaataggcggcgagcagcgattgaaataccgaaagaacactgactttattcgcctcacaaaacgacagaatctgctgatgaagcgcttcaggcacatctttagagaacctctcagcatctaaacttccccctgcggatgcattccgtttcaaggaaacaagttcaggcaccgattcaaattgtttgttccaaaacgccttgtccttttcaaaccgcttcgattgagcatattcctgttcagataaaacatgatcgataaatgaatgcgagattccttcttttgtctctgagccgctggctaattctaaataaatgtgcatgatcgcattcccgagaatattcatggagataccatcagaaatcacgtgatgaacatttgcgtaaaaccacacttcattttcctttatggtgaacaaggaaaaacggaacaaatcacaatcgtatagcggcaaaggtttcttcgtttcctcccggctccattgtgaaataaactctatcgcattcggatcttcagtagtgtcagtatgttttatatcaacaggccgatactcgctaatatattgaacaggctccccgttttcatctagccgcaaccgaaggcgcatggcgtcatttctgcgaataaactcttgaatcgcctgctcaacaagcacataatcaatcgcatcagctgaaaccagcttaccaatccccgcaagatttgaaatgctcgtgtgaggataaaatttttctgtgtaccaaattcgtttttgtgcatccgttaaagggtaaaaagttatttccatattgtcatacctcccctaatctttataagcagtgaacatgtgcaacgcattttctctttcttatccatatcagcttttaattcttatgaactaacagccgaaatagcccaaagtactacacttaaaaagcagtgcttccaatcaaaaaacagatggccgctattaaagcaggctgccgtcagtcagcattgcggcgtttaacataagcggataaagaccgcaagaccccaccctaataagaaaccaattttggctatttattcattgttttcaatattttttatctttctaccgttcagtttaaatgaaaaaaatgtttttatcaccgaaaaatgggtgaaaagtttcatgcgggatgccgaaagattccagtttatttacagcaatattttttgcgggatgccgcaatcatttccactaaacattatttacagaaaaataaaaatttttaaaccaaactgctgcgttcaatctttttttattgctgaatgcaatttacaatctttacatgactatgtgtaccgcgcaaaaaccgaaaaaaaggcaaaaaaagacacccttgcgaagagcgtcttacaacgattctttcatgacatttttgtcgatatcaatcaattccatatagcctttcccccactcatacatggcttcaagaataggcatgaggctttctccgtgcggggtcagagaatattcaaccttcggcgggacaactggatacacttccctgtgaacaatcatatcctgctcaagctctctcagctgattcacgaggatcttctgcgtaatatcaggaatcaatgtttttaattcattgaaccgttttgtgccttcttttcctaaatgccataaaatgagcattttccatttaccgccaatcactgcaagcgttaattccttctcacaattaaaccttttgtcgtccatccggctcaatagaatcccccccttagtaacctttttgtatgttagatacgtatcatcacttacttacttttttgcagactcttttttcattatactcactcataaaatcaagcgaaagaaatctgattgtctctcctcacagtatcctccaagtaacttgttgacttcaaagtgcctacttctcaacaaaagaaggaacctatagaatgaacaataattcgaaaaagggagtggatcaacaatggaattacagcttgcattagacctcgtcaacatcccggaagccattgagcttgtcaaagaggtagaacaatacatcgacgtagttgaaatcggaacaccggtcgtcatcaatgaaggcctaagagccgttaaagaaataaaagaagcatttcctcaattgaaggttcttgcagacctgaaaatcatggatgccggaggctacgaaattatgaaagcgtcggaagcaggcgctgacatcatcaccgttttaggggctacagacgatgcaacgattaaaggcgcagtagaagaagccaaaaaacaaaagaagaaaatcttagtggacatgattaacgtgaaagatatcgaatcccgtgcgaaagaaattgacgcactcggtgttgactacatctgcgtccacactggctatgatcttcaagcagagggcaaaaactctttcgaagaattaacgacaatcaaaaataccgtaaaaaacgcaaaaaccgcaatcgcgggcggcatcaaacttgatacactgccagaagtgatccagcaaaagcctgaccttgtcattgtcgggggcggaattacaagcgcagctgataaggcggaaacagcttcaaaaatgaagcagctgattgtccaaggataactccgatgaaaacgactgaatacgtagcggaaattctcaatgagttacacaattcagcagcttatatttctaatgaagaagctgaccagcttgccgatcacattctttcatcccaccaaattttcaccgcgggtgcggggcggtctggcctgatggcaaaatccttcgcgatgagactgatgcacatgggcttcaacgcccatatagtaggtgagattctcactccgccgctcgccgaaggagatctagttattatcggctcaggatcaggcgagacaaagagcttgattcataccgcagcaaaagcaaaaagcttacacggaattgttgccgctttaaccatcaatccggaatcaagcatcggaaaacaagcggacctcatcatcagaatgcctggttcccctaaagaccagtctaacggaagctataaaaccattcagccaatgggatcattatttgaacaaactttgctgctcttctatgatgcagtgattttaaaactcatggagaaaaaaggtctcgattctgaaactatgttcactcaccacgcaaaccttgaatagcatcacacaaccggcctgaagatcaggccggttttattttttctaaaataaaactttaaacccaaaaacccgataagtaatatgacctgcaaatcgtaaagggaggaattatgttgataaaacgatttaagatgaagctaggaactaaaattctttgcctcgttttcgtggtgattcttttgttttcggcatcagttggcactgtgatgcttaaggaaattacagaaagcatgaaacaaatggcaactgaaaaagcgaaaggtgatctcgctttaagcagcacttatattgatgatgtcatgtcaggcgactggcaggtgaaaaacaataagctctataaagggcaaacacaaatcaatggaaatgaagatattgttgatctgcttggtgaaaagacaggtgataccattaccattttccaaggcgatactcgtgttgcaaccaatgtcatgaaaaatggcgaaagagccgtcggcacccaggcttcttctgaagttattgccgctgttttaaagaaaggaaagcgtttttacggacaagcagatgtagcaggttcttcttatcagactgcatacatgccgttaaaagatcaaaatgggaacatcatcggcatgctgtataccggagctaatcaaagtattttagcatcacttacacaatcacttttcactcaattcgctatcgttcttgttatcgtcattatggtatcagtcatccttgtcttggttttcaccagaaaaatcaacaagcggctgaacgctttaaaaagcgcctttgaaagtgccggaaacggagatatgacaatagaggtgtcagacaaaaccggtgacgagctttcagaactaagcgtctattataataagatgagaatgaagctgaacgataccatacaaaccgtacaacaatcagcccttcagcttgcgtcagcctctcagcagctctcagccggagcagaggaaacaaatcaagcttcagaaaaaatcacagaagctgtacagcagattgcaaatggagcccaagatcagatcacccgaattgaaaatagtgaaagctcattaaaacaagcttcagcagacatccgggatatttctgcaaatactgccgctatcgctgacaaagggcagctcgctcaatcaaaagcagacattggacaaaaggaaattgcaaatgtacaggcgcaaatggatgcgattcaccagtcaattcagaaaagcggagaaatcatacaccagttagacggccgctctaaacaaattgagcaaattttatcggtcatcacccaaattgctgatcagacaaacctgcttgcgctgaatgcagcgattgaagctgccagagccggtgaacaaggaaaaggctttgctgttgttgctgatgaagtacggaaattagcagaagagtctcaacagtctgcggggcagatttcaaaactgatcatagaaatacaaaaggatatgaaccggtctgcaagatctgttgagcatgtgaaaacagaagctgcagaaggagtcaccatgatccagcgcaccagagatgcatttaaggaaattgcagctgcaacaggtgaaatcagcgccgagattagtgatttatcagcatctgtaacaaacatttcagccagtgcacatcaaataaatgattcctttgcagccaatacggccgacattaaagaatctactaaaaatacccggcaagcggctgcattaacagaggagcaatttgctgcaatggaggagattaccgcagcttctgaaacactttctcaattagctgaggagcttaccggtatcataagccaatttaaaatgattaatcaagccgaaaacggctgatgacttactatcattattgtaaattggcaatcgtattttgctgaaaacaaatatttcgatctgctaaaattacgatttctgcaataaactgatcgtaaaacataaaatttaaacctttacaccaaatgctttctggattactcttgtgtcagttttaaaagcgggaggtgaacatcacgacggacatcataaaaacgatacttctcgtcatcgtcatcatagcagctgcagctgtcggcctgataaaaggagactttttctcagctgatcaaaaaacgtctcaaacgaaagaatatgatgaaacaatggccttcccatctgaccggtatcccgaaactgccaagcatattaaggatgcgataaatgaggggcactcagaggtgtgcactattgacagagacggagctgaagaacgccgcgagcaatcattaaaggacgtaccttccaaaaaggggtatgacagagatgaatggccaatggccatgtgcaaagaaggcggtgagggagcttctgtagaatacatttctcccgctgacaaccgcggagcaggctcttgggtcgggcatcggcttaccgattacccagacggcacaaaggttttattcacaattcagtaaacagtacatagaggaggaacagcacattgatcaaatcatggaagccgcaagaactttcgatttcatatcatcaatttactgtatttcaaaaggattctacacctcctgtaatggattggactgacgaagcgattgaaaaaggatatgctgcggcagacggagccatttcctttgaggcacagcgaaatacaaaggcctttattctttttcgcctgaacagttcagaaacagtaaactcctacgaaaaaaaagtgactgttccttttcatgtcacagaaaacggaattcatattgaaagcatcatgtctaaaagactgtcctttgatctgcctaaaggagactatcaattgacatgctggactgtgccggctgaaatgtcagatttgcacgccgacacttatattattgatgctgtttctgtgtaatgaaaaacccctgagagaataactctcagggactctttataaactttctccgtttgtcttgatgacatcttgataccaataaaagctttttttcttcaagcgttttaaatcggatgtgctttcttcatcacgattgacatatacaaatccgtatcttttttggtagccgttcagccagcttaacagatcagtaaacgaccagctgcaatagccgattaaatcgacaccgtcactgatggcttgtctgcattgctcaagatgcgaacgcaaataatcaattcgataatcatcctgtacagtgccgtcctcaactttatcaaattcacccaaaccgttctctgttataaacactggaagctgatagcggcttgtaattcggcgaagaccgatacgcagcccaattgggtcaattgtccaatcccagttgctcgttgtcagatgcggattttttttcgttttgaacactccgggtatccccgtctcctgattggttcccttttggcctgtcgtattcattttcccttctgacacaccatcaagcggatttcgttcataggtgatcgtctgataataattgacacctacaaaatcaggcttccctttggcgagcaggtccatatctcctgcttcaattgtcggcgcccatccctgtttttccaagcagcggaatggaatttgcgggtaggttccccagcaatacatgtcaagccaccaattgttcgtaaattcttcggcgttttcaaatgccagtatatcctctggatgacttgataaagggtaagccggagaataagcaaagctaggacctattttgccttcaggcacatattctctaaatgattcgatggcttttgcattagccagaaacgcaatatggtttgcttcgtaaaatcgttttctgtctttcactccaggcggatgcatggctgtaataaatccgtgattaaaattgtagttctgttcgtttaacgtaacccaatatttcaccctgtctccaaaacgtttataaagagtaatacagtagtgattaaaatcctctatgatgtttctggattcaaacccgccgtattcgtccataagcgcttgaggcaaatcccagtgatataaagtcagaaccggctcgatgtgatgagaaagcaattcatcaatcagactatcgtaaaacgctagacctgcttcattgatctctccttttccttttggaaaaacccgtggccagctgacggaaaatcgatatgcttttaaccccatctcagccatcagagcgacatcttctttaaatcggtgataatggtcaaccgcaatctcgccattggttcctttaaacgttttgcccggtattttcgtaaacacatcccaaacagaagggcctttgccatcttcattccaagcgccttcaatctggtacgctgcagaagcagagccccacaaaaaatgtttcggaaaagattctggatgctggtggatcatagtgtttatcactcctgaattatttgataaacctatcataggctatgaaacgcgtttcatatcaactcgatgttagtcgcggaacagctcagctaatattgcctacctgtaaataacgcaaaagcacccaattcccattggatgcttaaaatcttaatgtcttttttcaaatttatgcggatgaggatggtgctttggaacaaagccgttttgtttcatcatttcaaagtgtttgtccaagtgatttttgatgtgttctcctctttctttaggcaggataccgtattgtacatactttgagatcacgtctttgcgctttttaagaatctctgcttccagttgttcaatctctttcttttgctgatctgtcagtgtaacatttgcgggagactgctgctgtttttcagcggcctcagctgtaccggtcagagaaatgacagccgctgcaatgaacattgtgataatgttgatggttattcgtttcatccattttattcctccaatcctatttttcatatgttttgctgccttgtattttttatgcataaaaataaaaagagcgaaccattattcgctctttctaatctcttcgtcagcattaagttcctcttcacctggtgtcgcataagtgacatatgttcccgcgattaaatcatgcagggtccgtttgtcttctcgtacggcaatcagaatcaggctggcgatcaagccgagtccgaaggttatacagtaaaccaggccggctacaataacccgtaaaaacattgttaacagactgacctgtgatccgtctttttttacgattctgattccgcagatcctttttccgataagataaccgcgccaaaacatcggcagcaaaatagaatacagcagaacaaccaaactgatgaacatgctgtcgtttgggtcttttcctgtaatcagccaatagatcagcaaaagcggcacggagactataatgtagtctaacaatgcagctccaagtctgatccaaaatccggctggtttgtaaatattcatttgactccccattatggtttaaatgtttccattttctttctcatcgaatatatcatatgccttaggggcatcagcaagacttaaatttattctgaagatcggtttcatgcctcttgaccatttcttccggtattggcatagatgagtgacgggtctgctgcatccttcactttcacatgcgtttccttggtacgtctggcattcatccttggacaattccttttttcatcacctcttcccttcatagacgcttttaaacacccacccatgctttttgtatacacaattcgaactttttgaaaacgcgatcaacatattgcaaccccttatgttcaatgctatctttttagttgattaacagattgggggaactataggtgaaatcattcatgcattccaaagccgttatattcagtttcacaatggctttctttcttatattggcagcctgttccggcaaaaatgaagccgattccaaggatacaggctgggagcagattaaggataaagggaaaatcgtagtcgctacatcaggtacgctctatcccacttcttatcacgatactgactctggctctgataagctgacgggctacgaggttgaagttgttcgtgaagcggcaaaacgcttggggctgaaggttgagttcaaggagatgggcattgacgggatgctgacagcggtgaacagcggacaggttgacgcagccgcgaatgacatcgatgtgacgaaggaccgtgaggagaagttcgcattttccactccatataaatattcatacggcacggcaattgtccgaaaagacgatttatcagggattaaaacgctcaaggatttaaaagggaagaaagcggctggcgcggctacaaccgtctacatggaggtcgcgagaaaatacggcgccaaagaagtgatttatgataatgcgacgaatgagcaatatttaaaagatgttgccaacggacgcactgacgtcattttaaacgactattacctgcagacacttgcgctcgcggcattcccggatctcaacattacaattcatcctgacatcaagtacatgccgaacaaacaggcccttgtcatgaaaaaaagcaatgcggcacttcagaaaaagatgaacgaagcattgaaagagatgagcaaggatggctctttgactaaactgtcgaaacaattcttcaataaagcagatgtatcaaaaaaaattgatgccgacgttcaggacgttgatttgtaatcggacgccatgatcaatagcattcagtgggaatatattttcaacacgaagctggccattgaatcgttcccttatgtcataaaaggcattggttatacactgctcatctcttttgtaagcatgtttgcgggaactgtgatcggcctgttcatatcactcgccagaatgtctaaacttgctttgttaagatggccggcgaagctctatatctcatttatgcgaggcgttccgattttggtgattttgtttatcctttatttcgggtttccttatatcggcattgaattttccgctgtcacggctgctttaatcggctttagcctaaacagcgccgcctacattgcggaaattaaccgttcagccatttcatccgtcgaaaaaggacagtgggaagccgcatcctcgctgggtctttcctattggcagacgatgaggggcatcattttgccgcaatcgatacgtattgcgctgcctccgcttgccaatgtattgctcgacttgatcaaggcgtcctctctcgctgcgatgattacagtgccggaattgctccagcatgcgaaaatcatcgggggcagagagtttgattatatgaccatgtatattctgaccgctctcatttattgggccatctgctccattgccgcggtctttcagaatatccttgagaaaaaatacgctcattatgtttaaacaaacgtttcattaaaaaaagccgttccccatgggacggctttttttctattgattcagcttccatttaaacgggtcctcaaacagcgaccagtcggaatcaaattcatactcagtcaacaggcattgatcaagctctttcgtgatcgtttcttcatccaggtcagttccgataaaaactagctgcgttaggcggtcgccgaactccgggtcccactcctccaggatttccggctcctgctgtttgacttgctcctgctcaagcttcggcaacgccgccacccaataagatacaggctcaatcgtaaccgacggacctgcttgcgacatcagcaaagcgaggttgttatgagatgcgcaccagacgattcctttggcacgtaccacgttctttggcatttgatccaaccaacggtaaaatcgtgtagaatgaaacggcaaacgtctcttatatacaaatgaagagataccgtattcttctgtttccggggtgtgttccgcatggcctgccgtcagctcttgaatccagccggccgatccgctcgcttcctcgaagttaaataaccctgtatgcaaaatctcctgcggttttacatttcctttgacggaacgaatgaacctggctcttggctgcagtttacgaagaacgttttcaagctgttcgagctcttgctcgctgaccaaatcacatttatttaagatcagtacatcgcaaaactcaatttgatcgatcaagaggtcggcgatttctctttcatccttttcccccaatgcttctttgcggtccagaaggctttcgcctgactgataatcatgccaaaaacggttggcatcaacaaccgtcaccatcgtatccagctgacagaattttgtaagatcgattcccatctcttcatcgatataagagaaagtctgggccaccgggatcggttcgctgattcctgtcgattcgatgacgatataatcaaaccgtccgtcttttgccagcttctcaacttcaattaataagtcttcgcgaagcgtgcagcaaatgcagccatttgacatttccacaagcttttcatctgttctggaaaggccaccttcctgcttaaccaagcccgcgtcaatgttcacctcgctcatatcgtttacgataaccgctattttcaagccttcgcgattttgcaaaatgctgttcagcaatgttgtttttcccgcaccgagataaccgctcagtacggtaaccggaatttttttcataatagtgcctccattaaaatagaatgattacgatttaaattgaatacttcgccgtatgtacaatggtgtagagcagcttttcgcgctcatttctcgctgccgcccgatttctaaatcagtaaagactccaaccgcgtttaatccttttccccatcgcaaatccttgcctttgccgacagcaagatccttaatcgatgcctttccgcttttcacagatgcacagacaatgataagccatttatcataaaacgtaattgttacgatttaaattgtatggtcttttttcctttttgtcaacggttttcaattcagctgatcaccacttttgtatgttcagggatattttcatatacccatttcgcatctggaatggtcagcctgatacatccgtgagatgctttcgttcctagtttttctgcttccgttttgatgactttttgatccttagtcattggcacactatgaaataaaaattcaccgtgatttttccatgatacccagtattctgcgccttcctggtatccttcggagaaaaaccattctccccgttcaggctctacataaaaggtgccctttggcgtagcatcatcttttgtttgatcaagaccagaagaaatcatcattgtatagatggtgttgcttccttccttgatgtaagccttctgctccttcacattcacatcaatccagacatgcttctgtttaatatccgggtattctccgcccgaaggctttgtccaatcaatgcttgtttttgctgtttttcgaacgtccgttatgttttcgaccgttttctttgtattgatacttgcgtgttcttctgcatgatcggagcaggctgacagcaggatgactggcataagaactgcaataatgaataatgagagtttcatattttatccacttccttcgaaaaacacagcttcgcataggcatcgtgaagatggatcgattcttcatttcggcattcaatctcaaaggctgacacccattcaagctcaaacaaatctgcagcaatcagccgggcgagatcctcaacaaatctcgggttttcataggccgtttctgtcacggctttttcatcaggccgcttcaataccggatgcagtctcgcagaagcatttgattctgcggcgtgaagcaaatcagctttaacatcacttggcagcgatgcggccgggtgaatatccgcccaaatgctgaccgttcccctctgattatgggcactgtattcgctgatttccttggagcaagggcacagagtcgttacttttgctgagatgccggcacgctgtttaaacggctgatctttgcgataggtgacagacatgaatatatcagcatgcatcaaacccgctttctcaagcttcgggcttttccgttcgaaaaaccacggaaacctcacttcaactgtggcagatgatgtgtccatgttttctgcaagctctttcgtaaattgctgaagagaggaaaatgagagaatccagccattttgatgatagacttgcagcagctctgttaaccggctcatgttaatccccttctgatttctcggcaaattacaagtcattgtaaagttcgcagccgttgtttgctcggcaggcatcatggcagaagtgattgtgactggatgggacacattagctacacctacatgctgaatgtcaaaaaaataatccttcctgatattttgcaggtccttcattttctctttttccactggtttctcgcctttgatcggactgaccgatccaaagtattgaagacgctccgtttttttcgggagcagcgtatgttgattcattcagaaaactcctctcactaacaaatcgtaataattactatttattttgatcggttcactgttgaaaatcaagagaaaataaaaaagacacgcacaaacgcgtgtccgtcaaaatcctaaacatccgccgggctgctttccgcgctccagcttttccgccagtaatagcctgcggcaagcacaagtgcaaacgccagcagcgcgatacaggaaaacgtgataaaaccgatagcatatgtgcctgtcatctgtttgagagatcctaagatgttcggcaagaaaaaccctccgattcctccggccgcaccgacgattcccgtcaccatgccgatttctttgcggaagcgctgcggcacgagctggaatactgcgccgtttcccattccgagccccatcattccgacaaacaatagaacaataaccattgagagagatggcaggctactgactccggccatacacagtgccacgatgacaaacaatacagaaagaactttcgtgccgccgacacgatctgaaatcaagcccccgacaggccggaaaaagctccccgccgccacacataatgtaacgaagtcccctgcgtgaatttttgacagctggtattgatcaacaaagaaaatagataaaaagcttgagagcccgacaaatccgccaaatgtgacgctgtacagcaggcagaaaaaccatgtttccttttgcccaaacacatgcagatagcttttgagcggctggggagacggctgtgcaggggaatcctttgccatggatacaaaaagaataaagacgatcaataatggaattagcgcaattcccatgacaatgtgccagccgaactgctctgccagacgagggccaaacagggttgcaaacaacgtgccgctgttccccgctccggcaatccccatcgcaagtccctgcaaatgaggcggataccagcggctggccataggcagcgctacagcaaagcttgctcccgccacgccaagcagaatcccgatggcatacagctcagtcagggaacggccgccgaatgtcccccaaagcagcggaatcatcgtcaccagcatcccgatcactgccgtttttttcggtccgattctgtccgttaaaataccaagaatgatacgaaacacagatccagataaaatcggcacagctacgacaagccctttctcaaaaggagacaggccaaaatcctgagaaatataaacacccagcgccccaagcataacccatatcataaaactgacatcaaagtataaaaaggaacagagcaaagtgagtggatgaccgctagttttcagttccgacagcttcataagattcccctttctagaccctcattattttacattttctgaatcaaggatataggaccattattttctggaaaagacatgtgtaagtttttgtgacacgtttaatgcgttaacaatgcattgtgacataatttttaataggagaaaacttacgagcttcgccaaaggaggtctgatacatgaagaaacaaagattagtgttagcgggaaacggcatggccggaatccgctgtattgaagaagtattaaagctgaatcgccacatgtttgagattgtcattttcggaagcgagccgcatcccaattacaatcgcattctcttatcctctgtattgcagggtgaagcgtcactcgatgatattacactgaacagcaaggattggtacgacaagcacgggatcacgctttacacaggcgaaacggttattcagattgatacagatcagcagcaggtcatcacagatcggaaacgcactctgtcgtatgacaaattaatagtggcaacaggctcctcccctcatattctccctatccccggggcagacaaaaaaggtgtctatggatttcggacaatagaagactgccaagcgctgatgaacatggcccagcactttcaaaaggctgcggtaatcggagccggcttattaggactggaagctgcagtaggtttacagcatctcggtatggatgtcagcgtcattcaccactccgccggcattatgcaaaaacagctcgatcaaacagcggcgcggctgctgcaaacagagctggaacaaaaaggcctaacctttcttttggagaaagacaccgtctccatttccggcgccacgaaggcagaccgaatccattttaaagatggctcttcattaaaagcagacttgattgtgatggcggccggcgtcaaaccgaatattgaattggctgtatccgctggaatcaaagtgaaccgcgggatcatcgtgaatgacttcatgcagacaagcgaaccgaatatctacgccgttggtgaatgcgctgagcataacggaacggtgtacggattggtggctccgctttatgagcagggaaaagcgctcgccagtcatatttgcggcgttccatgtgaggaatatcaaggctcagcaccatctgcggcgttaaaaatagctggaatcgatgtgtggtcagcaggaaagatccaagaggatgaacgcacgacgagcatcaaaatctacgacgaacaagcaggcgtttataaaaaagcgctttttgtagatgacaaactggccggcgttattttattcggagacacccgtgacaagcagcggcttctcgacagcctgcttaaacaacgagacatctccattgccaaaaaacagatcatcgaaccggagacaagcggccctttatttgaatccatgccttccagtgaaacgatttgccaatgcaacacagtgacgaaaggcgcgattgaagacgcggtgcacacgaatagcttaacaactgttgaggaagtcaagcactgcaccaaagccactgggtcctgcggaggatgcaaaccgctcgttgaagaccttttgagatacatgaccaacagcgaatatacgaagcccgccagcacaccttcgttttgcagctgtactgattttacagaagacgacatcatcgctgagcttcagcgcaggccattcactaatccggcagaagtgatgaaccagcttgactggaaaacaaaaaacggatgcagtacttgtgttcctgcgattcaatactatctggaaatgctgtaccctgggtttgtccagcctgagccagccactgaagagacatgcatcctgattccgcaaatgtacggcgggcggacaaacgcggagcagctaagaaccatcgccaacatcattgaggcatacagcattcccgacgtatccatcactcacggccaaaggctgaagctttccgggatcaagcctgcggatctcccgaacatgaaaaaagacctgaaaatgcccgtttacactaatgaacaccgacacgcgctgcaaagcatcaaagcatgtacatgcgggcaaaatcgatcgattcagcagctggcagcccaaatcgaaagacaacttgagatgcttcccttacccgctcccatttctatcagcttatcatgtgaaacagactgcaccgaggccgccctgcaagatgtcggcgcaattcggacacaagctggctgggacattcacatcggcggcgtccggggaactcatgcccgttcaggagctttgttttgcgtgactgagaacgaagacagcactgccggcatgatcaaaggactgatccagtattatcgggaaacggctcattacttagaaggtgttcatcagtggatagaccgtctcgggatcgttcatatcagagaagtgctattcgaagaagacctaagggcacagctgctggaaagcctccaaacagatctgtcactgattcaaaacccgactgtagagacgggcgcatataagaaaggatgaggcattttgactgaacgactgcttagatatttccgtgataaacagcaagacgtccaatcagaaaaaacatatgacactcaatgcccgttttgcagcatgcagtgcaaaatgcagctcgtggaacaaaccatcgtcacgcgcaaaaagtacactgcgatcgggattgataatcctacgacacagggtcggctatgcatcaagggcatgaatgctcaccagcatgccttgaactcctcccgcatcacccggccgctgctgaagaaaaacggcgagtttatgcctgtttcctgggaagaagcactgaatcatatcaaagaccaagtgacaatgatccaaactgaacacggacatgacgccatggcggtatacggaagcgcctcgattacaaatgaagaggcgtatttgttagggaagttcgcacgagtaggcttacagacaaaatacatcgactacaacgggagactttgtatgtccgcagcagccaccgcagccaaccaaacattcggcgcggacagaggcttaacgaatcctttatcagacatcccccacacccgtgtgatcattctggccggcaccaatattgcggaatgccagcctacgattatgccgtattttgaaaaagcgaaagaaaacggagcttacttcattgccattgatcctcgtgaaacagcgacaacgaaaatcgccgatcttcatctgaaaatcaaacccggcacagacgccgcccttgccaacggtctcgtcaaaatcatcattgacgaacagcttataaacgaggatttcattcaatcacgaacaaatggattcgaagagctgaagcagcatactgactcgttggacctgaatgacatcgccgaacagacgagtgtctcgctggtggatataagaaaagctgctgtgaagtttgccaaggaaacgtccggcatgctgtttacagcccgcgggattgaacagcaaaccgatggaacagcggctgtgaaaggcttcttaaacatggtgctgatcacaggaaaaatcggcaaaccttactcgggctacggggcgatcaccggacaaggcaacgggcaaggcgccagagagcatggccaaaaagccgatcagcttccaggctaccgttctatcgaaaacgaagaacaccgggcgcatattgcgaaagtgtggggaatccatcaggatgaactcccgcgaaaaggtgtctcagcctatgaaatgatggaaaaaatcaatgacggcgacatcaaaggactgttcctcatgtgctccaaccctgctgtttccagtccaaatgcaaatctcgtgaaaaaggctttaagaagactgacattctttgtcgcaatcgatttgtttatttctgagactgcgaaatacgcagatgtgattttacctgcctcctcttacttagaagatgaaggcaccatgacaaatgtagaaggacgcgtgacattaagagaagcaagccggccatgccccggcgaagcaaagcatgattggcagatcatttgtgatctcgcatccgctctcggcaagggccgctacttttcttatacgtcagcggaggatattttcaatgaattgagagaagcgagccgaggcgggattgccgattattcaggcatctcatacggcaggctcagacgtgaaggcggcattcattggccgtgtccggaatctgatcatcccggaactgggcgcttgtttacagaatcatttgctcatccggatcaaaaagcggcattaagtgtgattccaaacgaaccacctgttccaaaagagaagccgacagccgattatccgctttatttaacgacaggcagagtcatgtctcactacttaacaggcgtccaaacaagaaaaagcgccgcccttgccgcgagacattttgaatcgtttatggagatccatccgcaaacagcagcgacctacaatatcgaggaccgtgtactggtaaaaatagaatcgccgcggggaagcatcaccgtccgcagcaaattatcagaacaaatcagaaaagataccgtttttgttcccatccattgggcagacgctcaaaatgtgaatgatttaatcggggaagccttagatccagcctgtaaaatgcccggttttaaggtatgcgccgtccgaatcatacctatttaaatttttcataaaatttttagaacttttcgtatattttgttacattttataacatgtatcttaaatattcctttttgctgtgctacgctggaaaaaacatttgataaggagcggatcatctgatgggaaaaaaacagctagttcttgttggtaatggaatggccggggtaagggccattgaagagatactgagtgttgctaaagacgagtttcagatcacaattttcggtgccgaaccgcatcccaattacaaccgaatccttttgtcaaaagtgcttcaaggcgatacagatattaaagatattacgttaaacgattgggactggtacgaagaaaacaacattcaattgtatacaaatgaaacagtcatcaaagtggacacggaaaacaaaacagtcatcacagatgcagacagaatccagccttacgatgaattgatcctggcgacaggatcggtcccttttatccttccgattccgggcgcagacaaaaaaggcgtcacagctttccgggacataaaagatacagacacaatgctcgccgcgtcaaaacaatataaaaaagctgccgtcatcggcggaggactacttggtttggaagcagctcgcggactgctgaatctcggcatggacgtgtccgtcatccaccttgccccattcctgatggagcgccagcttgatgcaacggcaggacgcctgctgcaaaacgagttagaaaaacaaggtatgacctttttacttgaaaagcaaacagaagaaattgtcggtgacgaccgtgtcgaaggcctccgattcaaggatggcacaagcattgaagctgatttagtcgtcatggctgtcggcatccgcccaaatacaacgctcggggccgagagcggcattccggttaaccgcggcatcatcgtcaacgattatatgcagactgaaatcccgcacatttacgcggtcggcgaatgtgccgagcaccgaggaatcgcctacgggcttgtggcgccgctgtatgaacaggcaaaagtgctggcaaagcatatgtgcggcatcgaaacaaaaccgtatgagggctccgttctctccacacagttaaaggtatcaggcgtcgaggtcttctctgccggtgactttaacgaatcagaggagaaaaaagcgattaaagtcttcgatgagcaggacggcatctataaaaaaattgtcctgagaggcaatcaaattgtcggtgctgttttattcggcgacagcagcgaaggcaatcgcctgttttctatgattcaaaaagaagccgatatctctgaaacctctaaaatatcaatcttacagcccctcagccaggaagcaggcacaagcataaccgcagcgatgagcgacgatgaaatcatctgcggctgtaacggcgtgtcaaaaggtgcgattattcaagccatacaggaaaagggctgctcgtcaacggacgaaatcaaagcatgcaccggcgcatcccgctcatgcggaggctgtaagccgctcgtagaagaaatcctccagcatacgctcggatcagactttgatgcgtcagcgcaaaaagaagccatttgcggctgcaccacattgtcgagagatgaagtcgtagaagaaatcaaagccaaagggctgtcacatacaagagaagtcatgaatgtgctcggctggaaaacgccagaaggctgttctaaatgccgacccgctctgaactactacttaggcatgatcaatccaaccaaatacgaggatgaccggacatcccgctttgttaatgaacgaatgcacgccaatattcaaaaagacggaacatactcagtcgttcctcggatgtacggcggcgtgaccaactccacagatttgcgcaagatcgccgatgtcgttgacaaatatgagatcccgctcgtgaaaatgacaggcggccagcgaattgatcttatcggcgtgaaaaaagaagaccttccgaaggtatgggaagatcttgatatgccatcgggctacgcgtacggaaaaacgctccgcacagtgaaaacatgtgtaggcgagcaattctgccgcttcggcacacaagactccatggcactgggcattgcgcttgagaaaaaattcgaagggctgaacacgcctcacaaagtcaaaatggccgtgtctgcctgcccgcgaaactgtgcggaatccggcattaaggaccttggcgttgtcggcatcgacggaggctgggagctttatgtcggcggaaacggcggaacccatttgcgtgccggcgatttgctgatgaaggtgaaaacaaatgaagaagtcttagaatacgcgggcgcttacctgcaatattacagggaaaccgcaaactatctggagcgtacgtccgcatggcttgagcgcgtcggtttatcccatgtccaatccgtgttaaacgatccggaaaagcggcaggagctgaacggccgaatgaatgaaacactctctgtccacaaggatccgtggaaagactttttagaggataaacaaacctctaaagaattatttgaaaatgtcgtgaccacatcataatgacaaaaactatcattgaggaggaatggacatggtaaacaaagacgtaacaaaagtatgtatcggaaaaattgaagaattgcctgaacaattaggcaaaacagtgtatattgaagataaggagctcgcggttttcaagctttcagacggaagcatccgcgccattgaaaaccgctgtccgcataagggcggcgtcctggcagaaggcatcgtcagcggtcaatatgttttctgcccgatgcacgactggaaaatttccttagaagacggaatcgtccaagaacctgaccacggatgcgtcaaaacatatgaaacgctgatcgaaggagaacatgtttatctcgtatattgatcaaaagaccggatcacttttctagtggtccttcattttttacagtgacggaaggatgacatgatcatgaagaacggaatcgtatatttcgtgggagccggacccggcgacccaggcctgctcaccatcaaaggaaaacaggcgctcaaggaagcagatgtgattttatatgaccggctcgccaacccgaagctgctcgaatttgcatcaccggactgccagtttatttattgcggaaaactgccaaaccgccattttatgaaacaaaaagaaattaacgccctgctggttgaaaaagcattaaatgggttaaccgtcgttcgcttgaagggcggagatccgagcgtattcggcagagtcggcgaggaagcagatgctcttcatgagcacggcattcgctatgaaatggtgccgggaatcacctctggaattgcagcgccgctatatgcgggcatccccgtcacgcatcgggattttgcatcgtcttttgccatgattacagcgcatgataaatcattaaaaggcacgccgaaccttgactgggaagggctggcccgaagcgttcaaacccttgttttttacatgggtgtcaagaacttgtcttatatttgccagcagcttatttcatacgggaaatcgccttctgtccctgtcattgtcatccaatggggaacgtggggccgccagcggagtgtgaaaggaacacttgagaacattcagcaaaaagtgcaggaacaccagattacaaaccctgcgattatcgtcatcggagacatcgtcaactttcaaacacacagctggtttgaaagcaaaccgctcatcggacggcatttgatggttgtgactcatggcgaagatgaagacccgcttgcagacaagctgcgcgattccggcgccgatctcatcgagtggccgaaatggcggaccgaaaacatgcctgtcaatgaagaaattcttcgaaagattggcacctttgaagacgtttttttcacatcgcgccgggcggtttgtgaatttttcagagcactggcttctcagaaaatcgacatccgccagctgacagccaaactgagtgcagcatctgagcaagcaaagacagagcttgagaaacggggctttcttgtcaccgccattcagcctgattcagagaaacgtcttgttgtcgggagccgccatgcagtggaaaacatgcaaaagcatgaatcctgttcgttttatatcactcatgaaaacgtcatagatgaccggttcacccacatgattcagcgtaccatcagtgaatccccgctgcacatggtcatttgcccaaacaagctgtccgttcagcaattgatcaatggtggcgaacaaattggcattttgccggaaccgtcagcaagccgccctcctatcgtctgcataggcgatgactcagctgccggcatttatggattcacagccgtacaagaacaggatgaattgctagctttcatccacaatcaacatgcagagaaaaaactccttcacacctgatggcaagcagcccttttcctcaagggctgttttatttatgcaccaattttttatgatgggtggaatacatcgccatattctcggccttagggtccagataagccttggcactgttgaccgctgtcgggccttccgtaaatccgccggcaatcaatctcagcttgctttcataaaaagccgcgtcgcccgccacaaacacgcccggaagattcgttcgcatatgtctgtcagctttcacccttccttcttcaatctccagcccccactccatcatcggcccgagatcaattttgaacccatgattaatgatcagctcatcaatttctatgtctttcctctggccagactcagtatgacaaacggtcacgcttttgatgccctcttcatctccgttcaactgctccagccgataaggcgtaagcacccgcaccgatgattgcttcattttcgtcacgctgctttccattccgccgaattcctcacgccgatgaacgacagtcacagacgccgcaatcggttcaagctcattagcccaatcgaccgcagtatctccgccgcctgatatcaccacgcgtttccctttaaacgcatcgagcttctccactccataatgaagatttttgcccgcatatcgggccgcatcctcgctgtcaaactcattgacctcaagtgtacccatgccgcaagccaaaatcacagttcttgtatagtgctttttcccttcagaacccgtcagaacaatggtgccgtcatctaggcgttcaaacccggtcacacgctgattcaatacgatatcaggatcaaacgttgccgcctgctccttcagctgctcgatcagctgctttcccgcaatccccggtatgccgccgatatcgcgaatgattttctcaggaaagaataaagacaccttccctccgagcttcggcaaaaattcgattacctttgttttcagctcccgcatcccgcagtaaaaagcagtaaacagcccgatcggccccccgcctataatcgtaacgtcatatacctcttgattctcagccatccgtcctgcctcccgttcacatctatatcaaagttttaattgagaatgaatatcaatacaaagtatatcatatttcaagggcctttgtttattcatttcttctaccttgtggtcaattgctgaaaactctataataggcaaaaaccaattgggtgaaacagatgaaaagacgagttgaaacgatcaccttcgatggcggtacactagaatattctgtgacaggcaagggaactccgatccttgtcatgcatggcgggcattcaaattgttacgaggaattcggatacacagcgttgattgaacaagggtattccatcattacgccttcaaggcctggctatggacggacgtcaaaagaaattggaaaaagtcttgccaatgcctgccgtttctatgtgaaattattagatcatctacaaatcgagagtgtccatgtgatcgccatctcagcaggagggccgagcggcatatgctttgcctcacattatccggaaagagtaaatacattgaccctgcaatccgcagtcaccaaagagtggctcaccccaaaagacactgaatataaattgggggaaattctcttccgcccgccggtggaaaagtggatatggaagctgatttcttccttgaataacgctttcccgcgtttgatgtttcgagctatgagcccccaattcagcacgcttccgtttcagcgaatcaagtccttgatgaatgaaaaagacatagaagcatttcggaaaatgaacagccggcagcgctcgggtgaaggatttctgattgacttgtcacaaaccgccgctgtctctttaaaagacctgcaagccatcatatgtcccgtgctgattatgcaaagtgtttatgacggattggttgacttgtcacatgcacatcatgcaaaagagcacattcgtggcgctgttctctgtttgcttcactcatggggacacctgatttggctcggaaaagaagctgcagaaacaggcagtatcctactcggctttttggaatcctaaccaaagtgaaacgatcctttcccctcctccgtcaaacaagcagtgcctttttttctggtatcataagaaaggcagcttaacatgagcggaggttttattgtgacagcacaatcatcttttcttcagctgaattctatttttatcagcattttaatagaagccattccgtttattctgattggcgtcatactttccggaatcattcaaatgtttgtttctgaagaaatgattgcaagaatcatgccgaaaaaccgttttctcgccgttttattcggtgcgctggccggcgttttatttcccgcctgcgaatgcggcatcatcccgattacgaggcggcttctgttaaagggagttcctctgcatgcgggcgttgctttcatgctgaccgcgcctatcattaatcctatcgttttattttctacttatattgcgttcgggaatagatggagcgtggtcttttacagaggcggactggctctcgccgtttcgctgatcatcggggtcatcttatcctatcaatttaaggataaccagcttttaaagcctgatgaacccgggcaccaccatcatcatcacggcaccttgctccaaaaactgggcgggaccttgcggcatgccattgatgaatttttctccgtggggaaatatttaatcatcggcgcctttatcgcagccgctatgcagacgtatgtcaaaacatccactctgcttgcgatcgggcagaatgatgtatcctcttccctcgtgatgatgggtctggcgtttgtcctgtcgctttgttcagaagttgatgcgttcatcgcgtcttccttcagcagcacgttttcattaggatcgttaatcgcctttctcgtctttggtgcaatggtggatattaagaatctattgatgatgcttgcggccttcaaaaaacgatttgttttcctgctgattacatacattgtcgtgattgttttagcgggatcactactggtaaaggggtgattggatgtttcgtttattggtgctgatgggatttacgtttttcttttatcatctgcatgcctcaggaaatctaacaaaatatatcaatatgaaatatgcctatctttcctttattgcgatcttcctgctggccattctgaccgccgtccaagcatatctatttatcaagtcgcctgaaaaaagcggacatcaccatgaccatgattgcgggtgcggccatgatcacgagcatgaccatgaacaaaacaagccattttatcagcgttatttgatttatgttgtttttctttttcctttggtgtcaggcatcttcttcccgattgcaacgcttgactcatccatagtcaaaacaaaagggttctcgtttaaggcgatggagagcggagatcactactcccaaacacagtatttgcggcctgatgccagcctttattacgcgcaagacagctatgacaaacaaatgaaacagctgtttaataagtattccagcaaaaaagagatttctctgaccgatgacgatttcctaaaaggaatggaaaccatctataactatccgggtgaatttctcggacggacgatagaatttcatggatttgcttacaaaggaaacgcaattaacaaaaatcagctgttcgtattaaggtttggcatcattcactgtatcgctgattccggcgtgtacgggatgcttgtggaatttccgaaggacatggacatcaaggatgatgaatggattcacattaagggcactctggcctcagaatattaccagccattcaagtcaactctccctgtcgtcaaagtaactgactggaataccattaaaaaacctgatgatccgtatgtttacagaggattttaagtgaagacgaaaccagtacaagtactggtttcttttttatttctttttcatcagcatcaaatcgagatagagctggcaccgcgttctgaaatcgcttaaatcgatcgacgtcatctcagtaatctgtttgatgcggtaattcaatgtattttggtgaataaacagctgttctgccgctggttttgttttgcagttgttgaggagatagatttccaaggttttgagcagctcagtgctgctttcttcgtcttttgcttttaataaagctaaatctttattctcgtattctaaaaattcatttttctgttcgatgctttctaaatagcggtaaatgccgagtttggcatattcatatggaatgttttcctgattgccggtgatttctgcggctttgatgacttcaagtgcttctgtgtagctcttgccaagttttaataggtgattatattcgtttccgataccgatataaataggggtaggtattttttgaaagtgaaaatgtgttaacagcttgttaataaactcagaagctgctgaggagacggagcttttttgggaaaaactcgctacgacgatgacaatgtttgattcgatcgttaagacatgactgaccttatcccgtaaattcaggtacgacctgatattttcctttaaatcctcaaccgcttccccatccccatttgcggcgtgcaggataacaactgaaaacatggaaggcagcacggtgttgatcctttcagcttcccgtctgagttccttctcagaggtaaattgctgatagatcgcccgtttgatgagatcctctgctttttcttccttttcctgtttcaatttattcgttttataaatgattttcccgacatggaaggaggtctcgtacaaaaagtcgagctcttcatccgtcagattttggtccagctcctgaatccagatgtagcccatgacttcccctttgtgctttgcactcacgaccaccctctggtttaacccaatgctttcaattttattgacgcgaaaaggctcaggctctgttttcaatttttcaataattccgtccttcagaaacctctcaaaaatctggaccggacactttttcgaaaaaatagtctgctggttggcagaatcaaaatggttaatatagtaagaattataggctaacaaaaagaaatccgcgctttccagtatcactggcttttgcagttcatagctaataaaatcaattagcttatcaacatctgaaaatgaaaaaactctctctaaaagctcttccatacctttttctcctatactttttttactttaatcatatccatacggggtctttttgtatagaaaaaaatacgtttgtttccaaaagaaaaaaatggccgcttaaaaggagaaaagaggaaaaagggacagccccttcctcctcctttcgatctttattgcgacattgtatcttggtagtcgttgaactggtctgtgacagcttgtgacggagcctgcgtcaatatgctgacaaaaaagacagataatagactcgcagcaaaaccaggtatcatttcatacagaaagtccgaaagaccggcattcgcccaaatgattacagtcgctgctcccacaatcatgccggcgagtgccccccatttggtcattcgtttccaaaacagactgagcagtacaactggcccgaatgatgcaccgaagcccgcccacgcgtagctgaccaatccaaggatggtgttatttttctcccaagccagaaccaacgcgacaattgaaacagccagaacagccagtcggcctaaaaacaccagttctttatctgaagctgagcgtctgaacatcgacttatacaaatcttctaccagagagcttgatgtcacaagcagctgggaagaaattgtactcataatcgcggccaaaatcgctgaaatcagaaaacccgtgataatcggatggaacaagatattccctaattgaataaaaaatcgtctctgggtccttcagtgtcatgccgcgctgatggtaataagcgattccgcccaaaccggtcagcactgcgcctactgcagacaaaatcatccagcccatcccaattctgcgcgctcttttgatctctttgacagacgttatcgccataaaacgcacaataatatgcggctggccaaagtatcccagcccccaggcaaacaaagaaataatgccaaggacgctcgttcctttgaaaatattaaacatatcaggatctacagagcggatttcagcaactgtatcacctgctcctcccgtgtggaaaaacgtaacgatcggcacaagaatgagtgcggcaaacataataatcccctgaacaaaatctgtccagctgactgccaaaaagccgccaaacagggtatatgccacaacaacacccgtcacaatccacaggccggtgtgataatccatccccaagatgctgttgaataagacgccgccggacaccattccggacgatacataaaacgtgaaaaagactaaaatgacaattcccgaaaacagtctgagaagctttgtttgatctccgaagcgattttccaggaatccgggaattgtaatagaattccccgctttttcagtataggttctcagccgtggtgcgacgtaaagccagttcgcccacgctccaaggcaaagtccgatgacgatccaagcgccgctcagaccagtagaaaacatggcgcccggaagccccattagcagccagccgctcatatcggcagcgccggcactgagagcggttactgccggacccaaagagcgtcctcccagcatataatccgtcagattcgacgtacgcttgtaagcaaagtagccgattagcagcattcccgccatataaatacaaatcgaaataatcagctgtgtgttttctatggcacttcctcctcttttttatagtatatggatgaaatggacacccccgcagggaggatgcccatttagtcccgcttagaacatttcactgattgtttttgcttgcatatgcagagccaagtaatccggcccgcctgcttttgaatccgttcccgacattttgaagccgccaaacggatggtagccgacgatagcacctgtacagttgcggttgaagtataggtttccgacatggaattcctgtttcgcacgctcgatgtgcttgcggttgtttgtgataaccgcgcctgtcaaaccatattcagtattgtttgccacttctaaagcttcatcaaagtctgacactttacaaaatgcaacgacaggtccgaaaatttcttcctgcatgagtcttgctttcggatcaaggtcagcgaagatcgtcggtttgatgaagtatcctttcgaatcatcaccagtaccgccgcttactaaacgcccttcctgttttccgatctcaatatagctcataattttatcataagaaccttggtcaatgacaggtcccatataaacatctgcactgtcaggtttagctgttacttttgattccgtaatttcaatgacacgctctaatacttgatcatacactttttcatgaactactgcacgtgaacctgcagagcatttttgtcccgcaaagccgaatgctgaagtaaagatcgattgagccgctaattcaatgtccgcatcctcatcaacaacaaccgtatctttaccgcccatttcagcgatgacacgctttaaatgctgctggcccggctgaaccttcgccgcgcgttcgaaaattctcgtaccaacttctcttgatcccgtaaatgtgataaggcttgttttcggatggtcaacaagatagtcgcctacttccgctccgcttcccggaacaaagttgactacgccttttggcaatccggactcttcaagcacctcaacaaattttgctgcaataacaggtgtagcactcgcaggtttcagaaccactgtgtttccagtaacgatcggcgccactgttgtgcctgccatgatcgcaaacaagaagttccaaggcgggataacgactgtcactccagtcggcgtgtatacatattggtttttctcgccttcacggctgttgaccggtttgccttttgccagttcgatcatttggcgtgcataatactccatgaagtcaatcgcttcagccgtatcggcatccgcctcgttccaaggctttcctgcttctttcacaagcaaagctgagaattcatgttttcttctgcggactttggcagcagcgcggaacaggacagccgctctctcttcaggagacgtgtatctccactcttcaaatgcttttgcagccgcttgaatcgcttgctcagcgtgctcttgagacgcttttgacactcggccgacgacttcttctttatcagctgggttgattgaaacgattttcgcttccgtttccactctctcgccgttaatgacaagcggatagtcttttcctaaatattcgcttactgtcgcaagcgcttttttaaacgcttccacgttgttttgatcttggaaatttgtgaatggctcgtgtttgtaaggtgttgtcatgataatctctccttttttacttctttgtcattcctttgaaagcaaatgcaatgtttgacggacgttctgcaaggcgtctcataaagtagccgtaccaatcctcgccgtatggcaggtagactctcatgttataaccttcttttacgaggctgagctgggtttgcgaccgcatgccgtacagcatctgaaattcaaacttgtcattggcaatgccatgttccttggcaagctgctttgtaaagtcgatcattttgtcgtcatgtgtggcaatcgctgtatagtgaccgtttaagagctgctttcggatgatttttttgtaattttcatcgacatcgcttttctccgggaaagctactttttctgattctttataagctccttttacaaggcgaaggaacgggtttaaagaatccaaatcgtcaatgtctttttccgtccggtacagataggcttgcagcactgtgctcacatgctcgtatttctttctgaaatctttgaaaatatcaagcgttttctggcatctgacttcgtcctccatgtcaatggtgaccatgattttatgtttctcggccgtctgaaggatttttgtcatattttcatacaccaaatccatatctatatccaaacctaaagacgtcatttttaaagaaacgtgtgagttcagctcctgatccgcgatggtcgcaatggtttgaatgcactcttccgtacgctcccgtgcgacctcggcgctgttcacaaactcgcctaaatgatcgacagtaactgacaagccttggctgttaagctgtcgaatggtcgggattgaactgttaaagtcattcccgccgataattttacccgctgctacccgacttccccagttcctcgccattttattgagaaagccgcttttggataaaaataagaaaaaatctcttgtgatcacttccaacctcaacaccccgcaatctaagaagtatttgtatgagtttattgtaaatggacaaaaccagcgttcacaatattctcaaaatacaaagattctgattatttttgtgggtttgccacaatcagatagttagaaagtcggggggggattctgtcgaataaaggagaaaaggaagcgacaaaaaacatcagcttcctccatccttccacacttcttcaaccgtattcaaaagcaaacggttcaattcagatgtcatatcttttttctctgccttcagttcttttgccgcttccatgattctttcgatttccgtttcaatgaattggtgaataacatcgattcttgcttcgaggtcaagctcttcccctcttcttttccgttcaagcaaggtttccatttcagccttcagctcgggttcagcaacaagttcattcatcaaaacagtaaagtccattggcggtatggttccgtgcttttcaatccattggcaggccaaaataggccgaagaacgtagaagtactttttaattttgacctcttgtccttgtagataatccttgacgttccttctcgccatattgatatagtgatacacgcttgcttcaggcttaaatgcctccgtgcggagttttcttaactgctctgcggtcgtaaatgcttcataatacacaatgtctgaggacagccattcgagtagcggagggtttgactttttgaaaagccgaagcgtttttctcagctcccagccgctgatatccagcaaatcgtgaatcggttcctcaatgacatcacgctcctgctcaattgaaaagtaccactcctttttcggaacataaataaagcggacgtcgtaatcactatcctgcgagggaaatccccatgcgcggcttcctgactcgacggcatacacgattttgactccgtatgactgctcgatccgttttaattcatcaatgattctttgtttcatatctattcgtctccagtctgttctcattccggcagtttgcagaaaaaaaccgcctgatgatatgcggcggcttttcacatttatcagcctttaagatgctgcttaaagaaagcaagtttttcagtttgaaaagcagggatatactcatgtccgaagtagcggtacaccttcagctctttctttgtttccaaatgattgtaggcggcaaacacggtggacggcggcgtgaccttgtcaatcaggccgattgacatcaggacaggcaccttcactcggtcagcgagattcataatatcgaaatatgaaagtgtcttcatcgcctgcacttctgtttccgggctgccatttcttctgaagaaggaattgatttcaaggtacggctgttcaagcgccacatcaatggcccgttcgaagttgcttaaataaggataatcggcaaccgcggcttttggaatgtctgacagcgctgctgcggcaatggttaaacctccgccttggcttcctcctgtcacaccgatccttgtttcgtcaacctcgtcgaagctgctgatgacctcaagcgcgcggacggcgtccaaataaacaccgcggtaatagtatgtatctttatcaagaattcctttcgtcatccagcccaaagcgtgaccgtgcggtgaaatactcgtatcctcgctgctctgctggccgcggacaagcatgccgaatgtggcgtagccatggagtgcccagtttaccatttcatgaatctcaccatcatagcttgcattgtagccatgatatttcacgatcgccggatgcgggccttccttgtcaggcaccgcgtaccatccggtaatgcgggcgtttccgaagcttttatatgtgagacggtacacttttactccgtcagcaggatagtcaaccggctgtaaatcaggttctgcttggacttttgcaagttcctccaaagacaatttccaaaactcagaaaaatctttcggtgctgttttttcaggcttatatgtttgcaattggtcgagcggcagatcgaatagttgcatttccgattattcccctttgttttataagatttagtttgtattcctatactaccacgtttcgtctttgttttctaaatattttcatctttgtttcccagacagccttcatcaaacgtttgtttaagactttcccggcttagttccataaaggcctgggccgtcagactgacatagcggttctttaaaaagacaaagacgagggttcgtgatggcgcggattgaatcgataaatagatcacacccggatctttatcccttctgaccatattcggtgccattgtcacacctaatccgttagccacaagagattgggcggtttcaatatggctcgtcttaaaggcagcattcggcttaaagccgctttccgcacagagatcgagaactgtcctgcgaaagccgaagccttcttttaacagaataaagggcacgttccttaccatgtcaatcggcacacacggctggcgtccctcatcttcttccagcgctttctcaatcagcgcgaccaattccggcggcatccacctttgtttttccttcggcaccgcgagaacaaccggttccgtgagcaagggtgtaatggagagccgttcatcctcgatgggcaaggataaaacagaaaggtcaacttctccctttgccgtcatcttctctaatgaaaccggatctttttcaacaagctgaacctccacatgaggatagcgcgccaaaaactgcttcagcagcggaggaaagagatatctccctgttacagcaggaatcccgatggataatttatgaccgattccctgtgatcgctcctgcatttcccgaagcaaatcatctctggaacgaatgatgtcctcggctttttcaatgaaacgcctgccgtgaggtgtcagtgtaacagagccatgggatctgtgaaaaagggtaagccccagctcagcctcaagctttttgatttgctggctgagagacggctgtgcgatatgaagatgttccgccgcctttgtaaagctttggcgccgggcaatttccgctgcatattccatcactttaatatccatttcagcctccataggttgaacctatcattttcatcatttttatatcttggacgaatcataacagaaattgctaacataatccatatcatcatttacgaaaagaaggagctggttcaaatgacaaatgaaacaccgttttctaaaaacgccgagatgtatcgggatgaaaaggtatttgccgagggggaagatttggggttgatgatcaaaacagcggaatgccgggcagagcatcgagtgctggatataggagcgggcgccggccatacggcgctggcattttctccttatgtacaggagtgcatcggtgttgatgcaacgaaagagatggttgaggttgcgtcctccttcgcgcaagaaaaaggagttgaaaacgtacgctttcagcaaggaacggcagagtcactccccttccccgacgattcatttgacatcatcacctgccgatacgcagcccaccatttttcagatgtccgcaaagctgtcagagaggttgcacgcgtactaaaacaggacggacgttttctcttagttgatcattacgcgcctgaagatcccgttcttgatgagtttgtcaatcatttgaaccggcttcgagacccttcccatgttcgtgaaagctcattatcagaatggcaggcgatgttcagcgccaatcaactggcctatcaagacatccaaaagtggaacttgccgattcaatacgatagctggatcaaacgaggcggaacccccgctgaccgagaaaaacaaatcattacccacttgaatcacgcatcagacgaagcacgcgacacgttctgtattacattgaaccaaaacggacagcccatctccttttgtttaaaagcgattttgatacaagggataaaacgataaaaaaagccgtgcgctgcgcacggctttttacatcggctgataaagatcccagccaatttttaatgtctcaacaatgtaatcggcaacctcttccggggaaaggttgtctgttgccacttttgaattgtgcttgtcataaatgacttttctttcgttaaacagctgttccatttcatccattgaacggttatgcagtacagggcggctttcgatcaataaatccgcgcgctgcttccagttctcccatgacaggtccagatgaagcacgagacagttttccagacagcaatttctgatttcttcttgtttaaaagatcccccgcccagagatacgattttgaatcgtttatgatggcagatgtctaaaatatattccttctccgttttccggaaaaagtcttctccctttttctcaaatatctcaggaattgacatattgaaatccttttcgatctgctggtcaatatcaataaaatctctatataattttttagcgaccaattggccgattgttgtttttcctacacccatgaatccgatcaggacgatatttctttctcttactgggatggctcgtttagcgttcatcttcggcgaaatcctcctaaggaatgaaattatatattcattatatgcttatttagcgaatatttatatagataccggctttaccggtcaagcttatagtgcgctttgttgtagccatttttgcctgaatgacattcattgtacaacatttctgcaggtattttaatacttcgacgcaaaaaagcgttaaaaccttccgcctttattgtttttccagctgactcttcgatggaagggtctttttctgtatgataaataggaagggagaaatggcgatgatcatttggataaacggggcattcggttcgggaaaaacacaaacagccttcgaactgcacagaaggctgaacccatcttacgtgtatgatcccgagaaaatgggttttgcgctgcgctccatggtgccgcaggagatcgcaaaggacgattttcaaagctatcctttatggcgggcgttcaattacagtttgctagcttctctgacagatacataccgcggcatccttattgtgcctatgacgattgtacaccctgaatacttcaatgagatcatcggcaggctcagacaggaaggcaggatcgttcaccactttacactaatggcttcaaaggaaaccttgttaaaaaggctgcgcaccagagcagaaggaaaaaactcatgggccgccaaacaaattgaccgctgtgttgaaggattatcatcacccatttttgaggaccacattcaaacagacaacctgtcgattcaggatgtggcagagaacattgccgcgagagccgaactcccattagatcctgatacaagaggcagcctccgaaggttcgccgacagattaatggtaaagctgaatcatatccgcatcaaataaagcttctgtacacgacaaaagcccgctccgagagcgggctttcttcaacttatttccaccagtcatcaaacatagacgccggaacctggcgtttatgttcagtcatgctgtagcgtttttccagcgcttctgatactttcgctgatacttcttttccttcgagataatcgtcaatctcgtcgtaggaaatgccaagctctgtttcatccgactgctgcggtttttcgtcgagcagatcggcagtcggttcttttaagtataagcgttccggtgcacccagctctttcagcaaggttcttccctggcgcttcgtcaagcctgtcagcggcaggaggtctgctccgccgtcaccgtacttcgtaaagaaaccagtcactgcttcagcagcatggtctgttcctaacacaagaagaccttcctggccgccgatcgcgtattgcgcgatcattcttgttcttgcttttacgtttcctttattaaagtccgtcagctgatcgcctgtttcctgctgatactgatcagaaaaagcgctgactgtcgatttaatatcaaacttccatgatttatccggcttaataaacttcaaagcaagctgggcatcgtcttcatcctgctgtgtgccatgcggaagacggaccgcgataaattgagcgtctccgccctcctcgcgaatgctctccaccgcaagctgagcgagtcttcccgcaagtgttgaatcctggcccccgctgattcccaatacaaagcctttagcaccggttttctttacatattgttttaaaaaattgactcggtcctcaatttcttgctttggatcaattgagggcttcacatgtaactcacgcataatcttttcctgcatgctcatcccaatcattcctcctgtacattttcccttattactgatcatttccctaaatcaatgaaaatgaatcatgactgttatgtatccctattaaatatagcacaggtcttcattcactgtgaacaagagagatcagctgacttcaacccgtatggatgtcacactgtcgccattgcatttccctttttcaatcgggcaggaagaaaacgcgacaattaaatccatctccgccctgagccttacataatctccggcattcgaaagcggcgtttccacagacagattccctttctcatcaaggacagtattcataaaaatcgcaaatgggtaatgcatgtggggcttcggtacgccaaactgctcaagcgcacggttcatattgtcatagcacgtatcctgaaactcatccttttgcttcccatataagagcctgttcatatcaggacggcaggcgggcaacagcagatcatgcttgccgaccgtatcttcaatcagggttaacatcggcttatacaggttggagtagagatggtcgttgaccttcacatgaatggagtgattggcgtctatcgtcgctccctgatcaaggtgttcataaaaatccttggcatggtatgcgacaaaatcagccacctgctgcccttctacatcaaccacctttaaaatctgcccctttttcagcttcagcccaagcccttttttcggctccacaatatattgctgtgtcattggtttgctccttttttcattagtatgagcgtctgcttccttctccatgtaaaaagaggcaaaaatccgatgtatataagctttggacagatcacaatctaaccttagataaaaggggttgaataaataatgagccaaacaaaaaaagaccagccaaaagggaatctggcttggtggcagctgtcactgatcggagtcggctgcacgattggaacaggcttctttctcggttccagcatcgcaattgtaaaaagcggtttttccgttctcctttcatttctgatcgcagggatcggtacgtattttgtctttgaacagctcgccaagctatcggcgaagcagccggaaaagggctcgttttgtgcgtatgcccgaaaagcattcggcaaatgggcaggcttcagcaacggctgggtgtactggacatcagaaatgctgattaccggaagccagctgacagccatttcgctctttacgaagcattggtttcctcaagtgccgctatgggtgtttgcctcaatctacgcagtacttgggctccttattattttcaccggcctgtccgtctttgaaaaaacagaaaacgtgctggcagtcattaaaacagctgctatttttatgtttattgtcattgccatcctggctttatgcggtatcctgtccggcggaaatcatggcatacatgttccaaataagacgagtgagtttttcccatacggcgccatggggctgtggacaggtttaatctacgcgttttacgcttttggcggaattgaggtcatggggctgatggcggttcacttaaaaaaacctgaggaagcgtctaaatcagggaaactgatgctggcgacgctggcgattatttatatcatttcaatcgggcttgctctgcttttggttccgttacacacgtttactgaacaggacagtccgttcattacgtcattaaaaggatataaccttgagatcatccttgatatatttaacgggattttcatcatcgcagggttctcgacccttgtcgcttcgctatttgcggttacgacattgctttgtacaatggctgatgacggcgacgcgccgaaatgctttactctaaaggaaggcaaaaaaatatgctggccggcacttgggctgacgtttgcggggcttgtcctctccattattttgtcgttagtgctgcctaaaaacatttatgagcatatgacaacagctgcggggcttatgcttttatacacttggctgtttatcctgttctccagcaaaaagctgactgatcccgagggcatgggaaaaacgcaaatttatttagcgatggttctgattgctgcagctgtgtccggtacattgtttgaaaaatcaagccggcccggttttttcgtcagcataggttttctcgtgattatcgccatcgttaccatgatctatcaaaaaaagcagggtcataaagatcgccctgccagtccttgatttatttcattttgttgaacatgttctttaaataagaaaacgggcacttcgatacctgtttttcgtcatcacggaggaaatactgcttccattcacgattatcttttcctccgtaccagcctaattgcgggtgaatcggagcctgatcataggcctctaaacgagatcggatcagcctgctcatgttacggccaaatgcagttgatccatttaggtcatcaaacacccaccttggctgaaacgtgaccataaaaaaaggaaagctccggcttcttcttgcctcgtgccccggtgtagcgcacagaatgaaatacggctcgccgtcaaaacaaaactcccatttataatgctcaggatcggccggaatgtcttccggccattctttttcgtcttgatgactcagtctatttaaaaagcgccaaaacagctcttcatacgcttcaatcgaataatgctccgccaaatcttccggtgtatcaaacaacacaacgagggatgcgtattttcccgtgtcccgcgatatcttgccgtactccgcaagcaacggagccagttcctccgctgtgcggttttcccgcggatctccggcaaaagcaatccgaagctgatcagtcagaaacgcctggcgtccgggaatgcacggaaatgtatccgcgtcgtcccccagagtttctgccagcagctcaaaagcgattctttgccattcaggaagctcttcctgaatacgttccagaaaacttttggtgtaaatcccattcaccattgatccacctccagtatcatctggatactatattaaaactggaagcggcaggtgactgtccttcatgaatcagcccaataactgtttgatgccctgataaccaaagtaaaagccaaacacaaggagggatacaccggcgattccggtcaatcctctcaatagcttttcatgaagcaggtttctgaacgtactggctgtgatagccatgcagaaatcccagattaaaatgccgatcatgatgccggagctatagattagaagctgattcatattgtaggcctctgctgttttcgcaagaatgcttccgtaaattccaagccaaaaaaggatgctcaatgggtttgacaatgaaatgagaaaacccgatgcgaatgttttcctgtatgacggtttcccccgcgagcttcgcacatccatcggttctctgacgtttttcagcgtttcaattccggtataggtcaggacaaaaaagccgaacagccacaaaaacgttttcacaaatggagcggtcaagaactgcgacagcccgaaatagataaaaagcatgtacagcccatccgctgtcatggcgcctaaaccgaaaatccatgcatgccaaaaaccgtttttaattcctttgtctatttgcgccgcattcactggccccacaggcgcagacaaggacagtcccagcacaatatagctcaaaaaaatgttcaccggcccgtactcccttctcttatgtaacttgtacaatttattcgggaacgggccaagctatgcacaaattcacttactgtttcagacgttcaagctcttcctccataatatcggcagctttgcctacaaaactgaaaatgagttccagctcctcttccgtatattcgcggcacaaatccatcgttgactcagacagaggacggaacaaatcctttatatgttttttcgaagcagtcaaagggacgattacgactctcctgcgatcgttcgggtccttttcacgagccacataccccgctttttccagccggtcaacaagcgccgtgacggaacccgtgctgaggccggtttttttccccagctctccggccgtcatcggccctgcttcatttaaaatgtcagctgatttcaaatcggtgggaaacagaccgagagcttgagcggctgcctgatgaaacagaaccgttcttgtgcccagttttcgaaaaagctgaacagcagtcttttccaactcacttctggaatttcttgttgacaactgacagtcctccctataaaatcgagtttatcttgataatcgagatattcaacaatcaaactattatcatgatatcagaacttacatagaaaagtaagaggaggtagaacaaatggacacaacaacagcaaaacaggcttccaccaaatttgtggtcctcggtctcctgctgggcatcttgatgtctgcaatggacaatacgattgttgccaccgcgatgggcaatatcgtagccgatcttggaagcttcgataaatttgcctgggtgacggcatcctatatggtggcggttatggctggcatgccgatttacggcaagctttccgatatgtacggccgaaaacgttttttcctgtttggacttatttttttcttaatcggttctgctttatgcgggattgcccagacgatgaatcagctgatcatcttccgggccattcaagggatcggaggcggcgcgctcctgccgattgcctttaccattatctttgatttgtttccgccggaaaaacgcggaaaaatgtccggcatgttcggtgctgtatttggattatccagtgttcttggtccgctcttaggcgcgatcattacagattcgatcagctggcactgggtgttttacatcaatgtgccgatcggcgcattgtcattgtttttcattattcgctactacaaagaatctctggagcacagaaagcagaaaatagactggggcggcgcgattaccttagtcgtatccattgtatgcctgatgttcgcccttgagcttggcggcaaaacatacgattggaactccattcagatcatcgggctgtttattgtattcgccgttttcttcattgccttttttattgtggagagaaaagcagaagagccgattatttctttctggatgtttaagaaccgcttgtttgccacagcacagattctcgctttcctgtatggcggaacatttattattttagcggtatttattccgattttcgttcaggcggtctacggcagctcggcgacaagcgcgggcttcattctgacgccgatgatgattggatcagtcatcggaagcatgatcggcgggatcttccaaacgaaggcaagcttccgcaatttgatgctgatatctgttatagctttctttatcggcatgctgcttctttccaatatgacgcctgacacagcacgggtatggctgacagtctttatgatgatttcaggctttggtgtaggctttaacttctccctgctgccggcggcatcgatgaatgatcttgaacctcgctttcggggaacggcaaactctacaaattcatttttgcgatcatttggcatgaccttaggtgtcaccattttcggaacggtgcaaacaaacgtattcacaaacaagctgaatgacgccttcagcggtatgaaaggctcagcgggatcaggcgctgcgcaaaatattggcgacccgcaggagatattccaagcgggaacacgttcccagattcctgatgcgatcctgaatcgcattattgacgcgatgtcatcaagtatcacgtatgtctttttgctcgctttgattccaattgtcctcgcggcggttaccattttatttatgggaaaagccagagtgaaaacaacagccgaaatgacaaagaaagcaaattaacataaaaaaagcagtacatgctgggcatgtactgcttttttctattacactcctaatcttgcaagaataaacgtccatatacaaatgatcaataacagaatcaggctgtacgccactgtccttttaaacagtttagattccttgcctgtttggccgaccgctgcggcagcgatggcgatagattgaggagaaacaagtttcgccatgacaccgcccgccgtatttgcggctaacagcaaatctgaacccgcaccgatctgcgctcccgtgacaacctgcaaatggccgaacaaagcattattgctgacaacagaaccggtgatgaacacgccaatccagccgagaacaggactgacaaacgggaacaggtctcctgttttcgccaatgctaacccaattgaagagctgagccctgcgaagttggccagattggcaaaccccatcacgaagcagatcgtcataatcggcacccacagctcttttcccgtctccttcaaggaagcaaaggcatcccgagaggagaactttttgctgaacagccctgtcacgatgaccgccgctaaaatcgctgtaccagtcgctgacagcagatcaactttaaagactgcatctaacggcatggcagatggcgcaatcggcggcattttcataatttgctgatgcagaaaaggcattttgaacaggagcgttgattgatataacagcccgccttcttggaaaagcgctttgaaggcaggaaggctccagatggtgatcgccgcagttaaaatgtagaaaggagaccacgctttcgcaatgtcagcggcacggtatgcctttttctcaccagcatcgccggccccttcctcgcggtaaatctctttcggctgccatttgcggaggaagagggcaagcccgcccatgctgaataaggccgccaaaatgtttgctaattccggcccgagcaccgccattgtcagtgtctgaaccgctgtatacccaccgctcacaaccagaagagcgggccatgtctgtttgattcctttcattcggtctaataagaatacaagcaggaatggtattaaaaatgagatcatcggcagtgtccacattaatgtccgagacagctcaagagcagacaaatcaccaatctgcgcccctgtgatgacaggaatcccaatcgccccaaaggctccggaggcagcgtttgcaatcaagcagagcgccgccgcttttaacggtttaaaaccaagttcgacgagcagcgccgcactaatcgcaatcggaacaccaaaaccggccgcgccttctaaaaacgcgttaaaacaaaaaccaattaataatagctgtaatcgttggtcaggcgaaatgccggcaatgctggaccgaataatggtaaatttcccggttttcacggcgattttatacagccacaccgccatcaggacgatgtagccaatgggccacagcccgctcccgattcctaacaaaacagaagaaatcgctttttcaaccggcatatgaaatgcccaaacggagacgaagaaactgacggctagggtaagaaatgccgcaagaatgcctttcattttcaaaacagttaaagccaaaagaaaaaagagaatcggagtgagcgccacaagtgcgctcacatactcgtttccaaacggatcatacaactgctcccacattgacaatcagccctttactctaaagttgcggttagttgactttttgttctgcaaaatgaggttttaaaatgtttttaaggacgccggcgctgtgaaggaactgttctttttctttctcatttaagttcagctcagtgatacctgcgatccctccgcgattcacgacagccggcacaccgatgtacacgtcatctgcaccgtattgcccgtccaaatatgtgctgacagttaatatgctgttttcattatgaagaatggcttttgtaatgcgagcaagactcatcgcaaccccataataagtcgcgccttttttctcaatgatatggtaagctgcgtttttcacatcatctacaatttggtccagctcctcttgtttgtacgcatcgtttttctcaacgagttcactgaccggcacaccgccgacattcgcgtggctccaaacaggaagctctgtgtcgccgtgctctccgataatatgcgcgtgtacgttttgaggcgctgcgccaaagtattcgctcagcatgaaacggaatctcgcagaatcaagtgttgtgccgcttccaatcacccgctcttttggcaggccgctgaatttccatgttgcgtaagtcaggatatcaaccggatttgtcgcgactaagaaaatgccgtcaaatccgctcgccatgacttcactaacgatgcctttgaaaatcttcaagttcttttctactaattcaaggcgtgtctcaccaggtttttggtttgctccggcgcaaatgcagacaatatcagcatccttgcagtcttcatatgttccgtaagatgttttgaccggttgtggcgcaaacgcctttccgtggtttaaatccatcacatcgcccattgctttttctttatttacatcaatgaccacaagctcatctgtgattccttggttaattaacgcaaatgcataactgcttccaacaaaacccgctccgattaaagctactttatttacatgtttgttcatcattaatcatccttccagggtatgtttctctttgatgtctttttgtttgtgaagtatttcacatttatattgtgcaacacttcacaaacttttgcaagagaaaagttttgtctgatttatgaacaaaaaagaaaccatcattgatggtttctttcggtaagtcccgtctagccttgccctcaatggggaagagaaccgcttaagcccgagtcattatataaaccatttagcacgtaatcaaagccaggctgattctgaccgggcacttgggcgctgccattattaaaaatcacttttgcgttggttgtatccgtgtccgcaggcagcgtcagcgtgtaaattccgtctgcatttttagtcattggttttccaggccaagatccggtcaattcaattactcggctcccatcatgtttatagatataagcatttacctggctccaatgattcggattttgatagccgatggttttggccgacgctggatctcttttaacaaaactgtatttctcggtcctcgttacaccatcactgttcgttccttttaacatgatggtgtatgttttgccaaatggatctccttttccgattgtgaattgatctccatccttaaacgccgtctctggtccattattgatttgataaacggcttttgttgtattcgcatctgcacgcaaggtaatcgtcagttgatcattgaaagaatgtgttacacctgttttgtaattctcaaggaaaacatgaggcgcttttgcaatatcatcaggataaagcacagctacagacctggcattgatcgtgcctgtcagtttaccatcgttcacttgaaatgaacccgctccagctttattgtcatacctgccatcaggcaattttgttgccgtattgatagagacagaggatgaacctgcatttgccagcacaacgccatgtgagccgcgctgattcataaatatctggttgtttccattcgggttcgagagttcctcaggctgtccagccatcacattgtgaaatctattgaccgcagtgatagcctgatcttcaaataaagcactcccgcgatcgcctatttggcttttccccgggaacctcacaccatttccgcctccctcaggtctggaaaagaaaagaggcgtactgcctgaacgagaagctatcaccgcccagcctaaacggatatcatcatcgctcatccatgtcgactcttcatcatcattggcatacgtatcatgcgactctacccatgtcactagcttgtccgcagacacatcagatgcatagtgggagatattcgacacgcccagattacgattctttaaagcggaccttatggaatgcccatagttagacgctgtcacatccatataattcgcatatgcagcatctctggaggcactatcctgcaggatttctccgtattggaactctgcagatgtatttgtgatattcggccaaaattgactgccgtaactgccatcatctggaagctctatatgtttggcggcatcaaatcgaaaaccgtctgccccgtcattcaatgccctgtctaagaaccgtttcagataggactgtacttgtgtattttgtgtattccagtcatacagcccgagcaatgaattctgcgtgacatcccatcgatcagaccagtttttaatttgtgtgtttccatgtgtccagtttggaatactcttaacctcattggaaatcgcggcataatcactggtggtatgattgatgaccgcgtcaacaatgacctttatgccatattcttcagcggctgcacacatttctttaaattcttgttcagtacctaagtaacggttgccaatttgatacgatgtcggctgatacagccagtaccagttcgacatgcttttatctccttgattcccttcctttacttggttaatcggagatgtctgaatggctgtatatcctgcatcatgaatatccttcatattgtgttttaacgtattgaacgaccaattccatgcatgaagaatggttccgcttttgatcgacggtgctgtaagctcattcgatttgttcgccgtttcagcactcgcagccgccggtcctgccagaaccaaatgaaacagcaataaaaatccagcgaataacggcagtaaagaggttttgaatcgttttgcaaacattcttgacactccttatttgattttttgaagacttacttcggagtcaaaaatccctcttacttcattcttccgcttcctcctttcaaaccgatgtgaagactggagaattttgttaacgcttacatttaaaattatcacaatcactctatcaaaacaacttggcagagtgaatacaaatcaatgttcctataaaaaaagctgcccgaaactgtgaacgcttccctcgctttccaaacaaaaaagatgatttcttttttatttcttcttttaccgctcttctgtaagccagcttcacaatcacataccgaagcagaaacagaacgccgccgcagacgataaaaagaagaatcattttcagccaagcgaagaatgtatggggaatccccctgtcgtacatcgtaagcaccactaccgcaaaggcgaccgcaattgattctattcgctgctgcttcacccgtttttgcagttcttctttggtgtctattctcggcatgagcattccggatgccgcagccctgatgcagtaatataagataatgatgaacaaaaacacaaggcttgcagcccattctttaaacggaaattcaaacataatgccgcggatgatcacatcaagcagcgcaaatgctcccgctatcatcccaatctccgaccagattttttgttctttttcttttactctcttatttttcccattcacgcctgaaagtctattacgcagattattcatgaccttcctcccgcacttttacgaatggcttatggcttacatgttacaataacagcctgcgcttctgcaatgaataactcaaaagcccgccgtacaagccggcgggcagcaatcgttaaaacggcccccaattgatcatgactccgatcacgataaagacaagcccgatcaagaaccaaatcagagcaagcggcaccataaaccgcagccacttgacatacggaataccgctggcggcaagcaccgccatgagaacgccggatgtcgggttcacacagttgacgaccccttctccaagcataaccgcttcaaccgcaacctgtctcgtgattcccatcaaatcagcgagcggcgccaggattggaataaatacaacggcttcgccagaacctgaagagatgagaaaatgaagcagcgcactggcgatatacatgccgattgccccagcaatcgggctgaatccatccaaaagtgaagccaaagcattgacgacagtatcgagaagctttccattttcaaggataacggaaatgcttcgtgccatcccgacaatcagcgccccgtatacaagactttggcagcccgtaatgaaggttttggcaatatcgttcgccgcaagcccgcctattaaaccggcaaggacagaaataaaaataaatgtcgcagccatttgggaatctgaccagccaagcttcaaagcgccgtataaaaatccgacaagtgagagtcccgccacagccaaaatcagcttatggcgaacggtaaacggcactgactgatcttcttctttaccggcttcgcccattcctgccgcagggaaccaatctgttcctaacacactggcatcttttgatttttttaattttctcgtatacaaatagatataaataatagaagacagcaaaaagcatatgtatatcacaactcgcaggccgattcctgagaaaagagggagctccgcgattgattgtgataaaccgagcggtgacggtgataatatggtggagttaaatccagcgtagcagccgatgtatataacagcggctcccgcgactgcgtcccattttaaggatcgtgccacaatgaggccgatggggataaaaccgataactgaattcacgacaatcccggttgttccgagaatggagaacaatgcgccgacaatacaaataaataataattgctttgtgcggaatttgctgatgacattgtaaatcaggccattgatggcacccgttttttctagaatagcaatggtgccgcctgtgaataaaatcagaaagatgatgggtgctgatccaaccattccatcctgtagagaagtaaaaaagctgatcaatctgaccggagactgttcaattgaatgatagcttcccggaacagcggtcgtgacatccccctttgtcacgcggtcaaattcacctgccggcacaatatatgaagcgattgcgcaaatgaaagcaatcataaataagaggacataggcgtcaggcattttaaatgtcatacgttttttcttaggctgtgtttcggctgctggcatactcatatttcgatccatcccctctgtttgaaaatattaattattctgaatagtagcaatatgtgctatattatatacagcctatcttcctgtttcaatataaataaagtaaagaaggtaaaaattcattctgatagaaggaggtatttcttaccatgcaaaagctttcagaagaaatgaaacaaaccattatggacatcttcgagcatctgcacgcgaaccctgaagtcagctggaaggaatatgagacaacttcatttttgaaacaaaagcttgaggatttagggtgccggacgcgcacgttttcagactgcaccggggttgtcggcgaaatcggctcaggctcacctgttgtagcggtacgcgctgatattgacgcgctgtggcaggaggttaacggcacatttcgcgccaaccattcctgcggacacgattcacatatgacaatggcattgggcacgttaatgctgctaaaaaaacaacctgagcttccgaagggcacaatccgttttatctttcagccggcagaagaaaaaggcggcggcgccttgaaaatgatagaagaaggcgtgcttgatgatatcgactatttgtatggcgttcacgtccgtccgatccaggaaacacagaacggccgctgcgctccttctattctgcacggatcaagccagcacattgagggaacgatcatcggggaagaggctcatggcgcccgtccgcacctcgggaaaaacagcattgaaattgcggcatttcttgtacacaagctcggactcattcatattgacccgcaaatcccgcataccgtcaaaatgacaaaactgcaagccggcggtgaaagctctaacatcattccaggaaaagcatcgttcagccttgatttgcgcgcacagaccaatgaagccatggaggcattaatcgccgaaacagaaagagcctgtgaagcggccgccgctgcatttggcgcaaagatcgagctgcacaaagaacacagccttcctgcggcaacacaaaataaagaagctgaagcgatcatggcagaagccattacggaaatcatcggggctgagcggcttgatgacccgcttgtcaccaccggcggcgaggatttccatttttacgccgtgaaggtgccgaatctgaaaacaacgatgctcggactaggctgcgggctccagccggggctccatcatccgcacatgacctttgacagaaatgcgatgtttaccggcattcatattttggcgaacgccgtgctcaaaacatttcagaaggcggaatcacttgctgccgctaacgcttcttaacgcaaaaaaagcagcctgacacaggctgcttttttgattacttcttcaaatcttcaattgagttgacatttttcatatattgaggaacaacaagccccatcttcacaccagtcatactggtgccaatatcatcatatttgcctttatatttagcggcgtatgctttatgggtattcggcagccatgcggaaagggatgcatccgcacttcccgtcgcaattgcagtccacatcggcccagcctctacctgagtaagtgttacctcatagcccaagtcttctaagactttgcctatgacgtttgtacttgcaatctcactgtcccacgccacataggcaaggttgattttgtctcccttcaccttttgaacgccttttgtccattcggcaatctgatccttgtgtttattgacgtactcagcagcaactttggcaggtttctcgccttcttccaccttgatcatgatttcgcccatttcgtcctgcgtccatttaaactggctcagaagctttgcggcattcggctgctctttgctgaagcctttgcgtgtgatcgtatggatttcctctgcgctgccataagattgtttcggatcatcgagatatttcagcttatatctggagaacatccagtgcggtgtccatcctgtaatgataatcggtttcttacggtcgtatgactttttaagcgtagcggtcatcgcagcacttgacgctgaaatcaatgtccagtcattcaggtcataatccttcatcgctttgtcagtcagggacataatccctgaaccggggtcaatcccgatgatggtcttattcacttgttctgctgcggatgcattttcatcgttttctgaaccgcaagccgcaagtgagagcgccagcatggcggaaacgccgatgcctatgatttttttaagcatcaggcattccccctgcttttcttcttcactttaatattttgagtaatacggtccagggtaatggcaacgataacgatggcgataccggcctctactccgaccccggttttcagctgtgtaacggcactgtatacttcagaaccaagtcccggtgcaccgaccattgcggcgataacaaccattgataacgcaagcatgatgctctggttgatcccggccaaaatcgtttttgtcgcaagcgggagctgaactttaaacaaacgctgagctgttgtagaaccgaatgcctcagtcgcttcaatcaaatccgccggcacttgtttaataccgagaacagtcatgcggattgtcggcggcatcgcgaagataacagatgcaacaacacccggcacaacaccgatgttaaagaagaaaatcgccggcaatagatatacgaaagcaggcattgtctgcattaaatcaagaattggcgttacaatacggcgaaccgtttctttctgagacgcccaaattccgatcggaaccccgaccacaatcgaaataatcacagatgtcaaaacaagcgccaatgtttgcagcattgggtcccaatatcctaaataatcgatcaggaggaatccaatcaacgtaaataacgcaattccccttgtactgatccaccacgcaagtgcggcgaaaataatcgttaacaaaatagatggaataaatccaagaccggtgacaattccatttacaaaagcggccaatccgttagcgattccgtcgaagaatccgccaaacgtcatcgtaatccagtcaacaaaacggtcaataatatctgctaaaggtattctaggcagtctatccatcttatttcacctcctgtgcagaaggatcttgtgtttgttcgttagtgccttcagcattgatatactcgttattgccggcaagtgcgccaatcagcgcgcctcttacgacaattcctttcattctttgcttctcatccacaaccgcaattggaatattcgcatcggacacaacgtcaaaaatctcagtcagatacgtattctctggtacagtcgtaaattctgtattcaagatgtcttgaagtgacaaatcagactcagccgcttttttcgcatcagacgcatagataacacctaataatttcttttgtttatccactgcataaattgaagaaattccaaggtttttcatcagtgtcaatgctacgcgaggccctttatcaatccgcactgtttcagcgcgtttcataatgtggcctgctgtgaggactttagacaaatcaacatcttcgacgaatttctcaacatattcgttagatggattcatcaggatttcttcaggcgtgccgatttgaacgatgttgccgtccttcattaggacaattctgtcgccgatccgcaacgcttcgtccaagtcatgcgtaataaagataattgtttttccgacattatcgtgaagatcaagaagctcatcctgcatatctttacgaatcagtggatcgagcgcactgaacgcttcgtccatcagaaggatgtccgggtcattcgtcaacgcgcgggcaaggccgacacgctgctgcatcccgccggaaagctggtcgggatattggtgttcaaatccttccagtccaacgagcttaagagactcaagcgctttttgctgccgctcttgtttgtctacaccttgaagctccagtccgtattctgtgttttcaagtatcgttctgtgcggaaacagagcgaacttttggaagaccatgctgatttttttccggcggacttcccggagctggtcttttgacatatttgttatcatgtcaccatcaatgtaaatatttccggcagtcggttcaataagccggtttaacatccgtactaaagttgatttaccgctccctgatagacccatgatgacaaatatctcaccatcatatacttcaaaatctgcctgattaaccccaacggttgatccggttgctttcaggatctctttttttgtctttccgttggcaagcatttgaactgccttctttgtttgtttcccaaaaatcttagagactttctcgacttttatcttaattggtttctcatctacactcatattttccctccatattaagcaatctttattaccgtaacatttatgtaacttcccacacaaacagcatattctcttttattctgtaccatttctttataaacatccatgtgaccacatgatcttatttatgcttctaaatgctctgtaatcctcctatatgattgtattttacgggtgatttttctcctacctttagttgaaaacgcttttattggaattgaattcctccttcctcttatgacttcctgctcctttactggaaaaataagttgctttttcaacacccattatgtattatagtttcatgactatgaaacaatcagatgatcaaatcagagcgcaaatttttaaagcactgtctgatgaatcaaggcttgccattattcgtacgctttatgtcagcggaaaagaactcagctgcggtgaagtaggtgaaaagtgcaatattgtcaaaaccacggcatcttatcattttaaaacgctgcgtgaagcgggattgacggcaacccggaaagattcgcggacaaaatacgtcagtctgcgtgaagacacatttcaaacatacctgcctggctttttggaaaccctctaacaaagggttttctctatacatatctgtttcatagttttaaagttataaaacaataggagtgataaaatttgaatcgcatttggcttttcttcagtgtcatgtttgtcattggcacggatacctttttgctttcgccgcttctcccccttttacaggatcagtttcatgtctctactgatttgtcaggctggatggtcagtgcttatgcactcggttatgcactcttcgctttcattgcaggcccaatctcagaccggctgaacaggaaaacagtcatgctgtggggacttgcaggctttatcgtatccacatttttatgcggcatcgctccctcttttgccgccatgtgcctgttccgttttgccgcaggcgttagcgctgcgtttgtgacgcctcaaatttgggcgtccatcccagtcattgtccagccttctcagatcataaaaggcatggggattgcgacagcaggtttggccgcttcacaaatgctcggacttcctattggagggtttctcgcttcctttacatggcatacgccatttttcgttttgtcagcgtgctcgcttattcttctattgatcctggcggcggtcatgcctggcatccggccttctgaaccattggcgcgcccatcaattgtcaacccctatcgggagcttttttcattgccgaaaacatcggtcattctgcttgcctattttctgtttcaaaccggaaacttcgcatcgttcagctttctgggtacttggctttccgcggattatcatttaaccgtgtcacaaattggcgcagctatgcttgtactcggactgggaaatatgctcgggagccttatcggcagccgggtttcagaaaagctgggcatgtttaaaacactgatcagcgggatgctgctaatgggcgctctctatttcgctcttccgttctttccaaacttgtttttagtagaagccggcttttttctcacgttctttacagctggcatcatctttccgttaatgatgggtgtctttcaatccattgcaccaaatgcgcgaggaaccatcgcttccctttccaatgccgctatgtatgccggaaccactgtcggtacaagtattgcaggttttttatatcaaagcacacagcatttcggagctgtcacaggatttactgccattctgttcatactttctatgacgctctaccagacaatcagtaaaaccgggaaacgccaatccacagcccgggcgcaattgtaaaaaagcacctcattcaagaggtgcctcagattgttgacaaaatcttttcagcgtgattgaaaacccttgaagtctaggaaggacgagcataggagcggacattcacaggatgtgatgacgacggcgtttaggcaggacgcctgagaatttagccgttgatccacttcgcattgagcaccgaagcgcagtcctgacaacgaatgcgagggtttgtcgacacgctgaaagcacctcttttaagaggtgcttttcctattctagctcagtttgtttcgtttctttccccataatcaaaatacaagcaaccgcaagtaagattgcaatgcaaaagattgaaaagatgaccgaaaacgaaatatgacgggctgccagggttccgacgagcaaaggcccgaagatgccgccgattcttccaaacgctgctgtcgttcctgaacctgttgctcgaatcgcagtcgggtattgctccggggtataagcatacagcacgccccacgcaccgagattgaaaaacgataacagcactccagccgtaagcagaagacttaaggaatccgccgttccgaagaaataggcgcttcctgctgtgccaatcaagtaaacgacgagtatccacttccggcccgctttttcaatcagccatgcggcagagaaatagccaggtagctgagcaagcgtcatcagcaggacatattcaaagctttgaatcatgctgaagcctttcagcagcatgacactcgggagccataggaacatgccgtaataagaaaacaccacacagaaccaaacgatcgacagcatcaccgtcggccgtatatactgtcttgcccagacgctttttacattctcccacatcgacctctttttggcagaaagcgattcatatttcggcgaatcaggtagactcgtccgcaggtacagcgcataaaaagcagtcagcgcagttaacagaagggcagcctgccagccgaagcttggtatcacaaagtaagaaatcaaggccgctgcgagccagcccacggcccaaaagctttccaaaagcacaatcactctgccccgcttttcaggcacaaccgcttccgaaacgagtgttgaagcgactggaagctcgccgccaagtcccataccaatcacgaaacgaaggattagaaatgccgataagctcgtcacaaaagcggaaatgccgcttccgatggaaaagcataaaagggtgatgatgaacacttttttgcggccgattcgatcagcaagcaaaccaaacaaaaacgcacccgcagccatgccgatggaattgacgcttccgatccatttcatttcttcgggcgacagattccactctacatggagcgcggcgataataaacgataatattccgacatccattgcatcaaacagccaccccaaaccggcgacgcccagcagtttacgctgggatataggctgttgttttcccattgccaacacctctgatatgcaaaatgattaccgtttaagtttacacctgtctttacacattgtcattaactaaatgatgtaattgaaataccccgcttatgttccacaagcggggtttttattattgctgcaatgctgcttttttaatattatcctgaagctgggcaattcgtctcgcgccgtcttcgcggaggcgcttgttttcttcttcgatttgttttgtttcctgcatgccgctgacaatcgtgttccaagacgattcaatcgtttcaatatctatgctcggtctgccggccattctcgcaatttcaacactttggctcgagatgttttcagcatttcgtttcagcatctcgtttgtccggcggtcaagctcgctcatggaatcagccacaagcttttgccgctttaccgtaacagcctgaataatgccgtttttgaaaatcggaatggtaatgataaacgcggagttgattttcccgatcagctttgcatttcctcgctgcaggagacggatttgaggtgcggtttgaagcgccaccatccgtgccatgtcaagatcatacacccgttcctcaagcgcctgaatgccgttgcgcaacgtatcgagctgcatttgcgccagctggttcccgcttgccgctttttcctcatatgaaggaaggatcgactgcatctcttccagtttcatctgcccggcaacgacgtatttttcaagctccatatagtatttgatattgttttcatacatttcatcgagcgtgtagttcgtcttcgtcatctcatctttgtattttgaaatctcaacgtggattttttcaatctctccgccaagcgtctgatactttttaaagattttttcaatcatgctgccgccgcgtttgaaaattttcgccattaatccctttggctcatcaaaatcatttttgtcgaagcggtccatgattttcccaagctgagtcagcattgtgccggagtctgtcacgcttgttgttttcatcatccccaagatgcggtcagagaacttggatatttcaacggccggctccttgccgtactcaagcagctccatttggtttttgacgtcaatttgttgagcaagccgcttcacttctggttcctgacggagctgaagacggatatcgtcagctttttgctgggaaatctcttcatttttatcgagaacaagcggattttgattttctgttgtcatgcttttcttctctccttatttttgggtaatggttctgaagagccttttcacaagcgaaggctctttgtagtcctgctgaaacaccatgtcatccagccagtggatatcatactgatcctcttcaataaactgctcaatatcttggtgtccgggcggattataaatgatgatatcgattccgatttcattcaggaacagcagggcggcagcatccgaacgcgtgagtccgccgctcatttccgtatgatataaaacgagtttcggaacggtttgcgcatagtcgaacatttgaatcaatttcagcagattagcaggcaggtttgttgtttgtttaaacaaatagatttgaacatccttgacttgttcctgatgcaaggctttaagccgcgggtacctgcacattctcgaaatcgttttggcaatggcagtctgaacgcccgccggcagctgtttgtactgccacacattgcttgccatcagcttgtccggatcaatgttcccttcttgatcaagtgcgtggctgtagtgaaattgatagttcgactttatttcttctgtaaatggaaagcttctgaccatttctgtttcctgataatccgctagagtatgaagcctgttccaatattccttattgtctttcgacacgcccataattttggcgaatacattcggaatctcaatggaatgtttatcagctttgaaattcggccgaataaaggcgcgttctttcgtgattaaaaacaattcatcataggtcgttttcagcgtaacggacaccggtgtgtgatctctgaactgccacggcttatatagcatggattcctcgtgattcagcacatgttcaatttcctttgttgagcggtaagccactgttgatttccggtctggtttttctttcggaaacggctgaagctccgaaacatccgggagcttttccgtaaaaccgagctcctgcttcgggtcgacaagcgccagctgatccgttcccgccggatggaacagcagtacatcacagccgaccagcatcagataatataagaaatagagctggcttttcgtcgcatctccataccaaacaaccttcggcatctcccgctctatatcggttttttccagccaagggttcagatggtttaaggaaaacttcgagacatcaagcagcactctgcgaaaatcaggatgattcagccccttttcatgactgtccgcaaaggtatgtaaaagcgtcatcaacgcttttcttaaatggcggtgcatcaagggatttgagtgcttcgcaatcagcttttccccgtccagaaaggcaacaaagcggctgactgacagccctttttctttctgattgatggaatgaatatgctgaagcttttgaaatgtttccggttcgattgttttatcaagcgtttcactcaaaatcgttatgcggtcgtttacagacagctcatacagctcgttatagtagtccgtctcatcaataggcgtgcccaatatctgaccggcaagacgagaaaaagaaaggccttgtgcagtttcatagtgatcccgctccggcaatggctgaaacagcaggcttttccaatcgccatcagccggaagtgctttatgaatggttagttcttcttgtctcatcatatcctcctttccggtttgtcattgaaacgatatttcggtaacaaaaaaggaaggacattgaacctccctccttgttttgttttattcttcttttgaagcggctgtttgttcgcgcacctgcttttgtttattgatgtagtgaatgatcaatgttaccgcaaatgcagcgataatgataatgaagaatacagagtgcggcatttcgtaatggaaagcgctccccgccattttcagcgcgataatgccgattaagacgaatgctgtgttttccagctcaggaattttatcaatcagcacaaggaacacttttgccactgtacgcatcattaaaataccaagcataccgccaatcagaagcacccatactttttcagatactgcaaacgcggccaggatgctgtccacagagaaggcaagatccattaattctactgaaatgacagtcgcccagaagatcccgaacgtgcggaccatccaagagtttttcttcatgccgtccgcttcctcttctttttcgcctatccagaagtgcttaatgacgagccaagccaggtaaagcgcgccaagcaccttgatccaccagaatttaatgagaagcataccgagcccgatgaaaataaacctgaaaatataagctccaaacaaaccatacgttaacgcttttttccgctgtttttccggcaggtgtttaaccatgaccgcaagaacaagcgcgttatcggccgataaaaggccttccagaacaacaagggaaccgatcaaaccccaggaaacaggatcagtcagaacttccccccacattttccaatcgaaaaatgaagcatacgtagacaaaatatgatgtaaaaagtccaagttttttcctcctataatttgaaacggtgacttctctatttgtcactcgcttacacttgcaaaccgtaattccggcacaatgcagccagcccgccggaaaatccgctgccgattgcattgaatttccactcgccgccgtgtctgtaaagctcacaaacgacaacagctgtttcaatggagaagtcttctcccaaatcgaagcgaagaagctcattctgcgtttcttcatccacaacgcggacaaatgcattggaaacttgtccaaagttttggctgcgtgcttcagcgtcgtgaatggtcactgtgatgccgattttctcaatgtgagcagggatttttgagaaatcaacgataatctgctcatcatctccgtcgccctcacccgtgcggttgtcacccgtatggatgacaccgccgctcggatgttcaaggttattatagaagacgaaatcgagatcatttacgcagttatcatgcgcatcaactaaaaaggccgaagcatccaggtcaaaatcgtgtccgccggagtacttgtttgtatcccagcctaagccgatcaccgctttagtcagtcccggatttgtttttgttaaatcaatgcgctgtccttttgataattgaatggccatactgcctctctcctttctgctcttcgtatttgtcttaaccgacttgcaaaccgtagtctgttgcaatgcgggcaaggccgccttggtagcctgagccgattgctgagaatttccactcgccgttatgtctgtaaagctcccctgcaatgattgccgtttcaatagagaaatcttctgcaagatcgtaacggatgagctcttcatttgtttcttcatttacgatgcggacaaacgcgtttgatacttgtccaaagttttggctgcgcgcttctgcatcgtgaatggtaataacaaatgagattttatcaatgtttgccggtacagcgctgagatttacttttacattctcatcgtcgccttcgccagcaccagtcaggttgtcgcctgaatgaacgactgaaccgttgccgccttcaagctggttgtagaaaataaagtcgtttggtgacgcgcatttgcccgcggcgtctaacagaaacacacttgagtcaagatcaaagtcgtgcccgccgtcatacttgttcgtatcccagcctaaaccgacaacaacctttgaaagacccggatttgtttttgttaaatctactttttgtccttttgccaatgaaattgtcatgtttcatccactccttttcttttatacgtatcgactgataatatcttctaatctcgtatcgtttgtgccttcaccgaccgccgcaaacttccactcactgccgctgcggtagatttctgctgtaatcaggcttgttctgccggcgtaattgtctctcaaattgtacttgagcatttcctcgtgattagattgatcaactacgcggataaacgcattttgaatcatgccgaaatcttgttttcttctgacacaatcgtaaatgttcactacaaatacaagcttatcgatgtttccaggcactttatctaaatctatcataatttgctcgtcatcgcccgcaccgtcacccgtcaggttgtcgcctgtatgctgtacaccgccgcagcggcttttcaggttgccgaaataaatcaggtttttcttatcggtgaattttccgttttccagcatcagcactgaagcgtcacagtcgatattcggaccgcctccgccaagcagtttgctgaagaatcctccgcctgaggacactgggtcccagccgagaccgaccatcaattttgacagaccggcttttccttttgttaaatcaattcgttgacctttttctaaagaaattgccacacgattcactcctactcatcaaaatgtgaagatagtcacatttatttttacgctcacaaggaaaataagccgtaaattactaatatatacgtttgttattatatcaaagtttcgtaaaagttaagaataattgacgaaaaacctcgaaaaaaaacttccatatttgatatatgatttgcaaatgctataaagtgcgcttcttaaacaaaccatttgacgcgggcaagtcattttgcctattctggtgtcaccatctaaaaacagacagaaaggaagcggccttttgattcatttaagcatacttgatcaggcacctgtttctaaaggagaaagccctgtgacaactctccagcattcggttgagcttgcccaattaagcgaacagtggggctataagcgttattggtttgccgagcatcacagcacgaaaggactggcaagcacagcgcctgaaatcatgatcgcccgcatcgcagcacagacaaacaccattcgtgtcggatcaggcggcgtgcttctgccccaatacagcccatttaaagtggctgaaacctttcgccagcttgaggccctgtatccaaaccggattgacctcggcgtcggtcgctcccccggcggcacgacaaaaaccagacttgcattaacggacggggtgaaaaaaagcttaaccgaatttaacagacagctgcaggatgtctcttattttctaacagattcccttcctcccgaccatccgtatgccggaatcaaagcggcgccccttattggtacggcacccgagctatgggtgctcggtcttggtgaaaacagcgcaagacgcgcggcgcaccaggggattggatatgtatttgggcatttcattaatcccgagcgaggagaaaatgcattccgcatctaccgggaaagctttcggccctcagcccatttttcgaatccatccgcactgtttacgatttttgtcatttgcgcaaaaacagatgaagaggcagaagaactcgcattaagccaggatctgtggcttcttcgcgtcggaaaaggcttggacagccgcgtgccaagcatcgaggaagcgaaagctcatccctatacagcgtccgataaaaaactcatagaagaaaacagaaagcggatggtgatcggttctcccaccactgtcaaacaacagctgttagacctcacaggctgctacgaaacaaatgaaatcatggttctgtgcaatgtgtttgattttgaggcgaaaaaagaatcttatgagcgccttgccgaattgtttctataaaaaaagcagttttccctagggaaaactgcttttcatgttatcggcttctttttttgcgctgagcttcttttttgataaacgtccaaactccctgaactgcaaatccgattaatagcaaaacgatcaatagcagggtaatagacggacctggcggcgtcccgagctgataggatgatgtcagtcccgtaaatacgctgaataatgaaatgagtatggctgtaatgaaaaccatgttaaagccttttgcaattctgatggcgaaggctgccggcaatacgagcagggccgatacaagaaggaccccgatgatcggaataatgactgaaatcgcaaggcctgtgacaatactgaatgacaacgagagaacgtttgtattgattcccgatgttttggctgtagcttcatcaaacgtcagcaggtagagcggccttctcagtacaataaaataaagcaggatcagcagtgtgataatactgataatatagacctgctgctggtttactgtcacaagcgatccaaataggtattgatcgatgctcatattggctgtgcctttggaaaggctgattaaaaacatcgcgaaggacaaaccagctgccattaagatggcaatggacacttctgaataagtccgatacgcccgccgcatgtattcaattccgatcgcgccgatggtcacgacgactatgcttgctgcggttatattggtgctgagaaaaaagccgatggcaacacctgacaatgagatatgtgaaagtgtgtcagccattaaggcctgtcttctgagaacgagatacactcctagtatcggagccatgacggcgatcatgccgcctgctagaaaagctcgtcgcatgaattccaagtcaaacatttccatccgcctttttctcctctctctaatcgaatcactttatctaaaaattgctgtacttcgttttgttcgtgagtaaccatcacaactgtgcggttgtgatttttcacgagatgatgcataaattcgtaaaatccttttctgctgtcgtaatcaacagctgtcgtcggttcgtccagcatcagcagatccgggttgctggcgagcattctggcgatacagattttctgtttctgtccgcctgataaatcaccgattttacgatggcggaggtcccacatttccaccattttcaatgctttttctacttcaagatgatcttcttcatttaaacgtttaaaccatttcccttttgtatagcggcctgactgaacaagctccagcaccgtgctcggaaatccggcattaaatgaagaaatttgctgcgggacgtaccctatggtcaggcgtttcccttctgtattccttttactgatcgtcactgtgccttcccacggtttcagcatgccgagcattacctttatgagcgtcgatttagaggcgccgtttggtccagtgatgccgacgaactcaccgctttcaatatcaagtgatactttatctaaaacaggcgtatgggaatagccgaaaacgatatctttcaatgagacgagattcatgttaatcttcctttctcacaaagaaatagtgtgcacccctccggcgcacactatcttatgatttaaccaatagtgaatctttcagggcatcgaggttttgtttcataatgtcgatataccctaaacctttatcctgttcttctttgctcaagccttccagtgtattcagcacttctgtcttcgcgccgatttcactggcgagcgtatctgcgacctttgaggatgcaatttcttcaaagtaaataacttttacattatgttctttggcatatgttttcagctttgccaagctggctgcgctcggttcttggtcaggtgaaagccctgcaatcggaacctgcttcaagccgtattcttttgccagatagccaaaagctgtatgctgcgtgataaattcttttttctccgctttttttgcggttgtacgatatagtttatcaagatcctgcagttttgcaatatattctttactatttttctcatagtattctttgttatccgggtcctgcttcacgatttgagccgtaatatttttaacttccttctgtgccagaacagggctaagccatacgtgagggtccattgcatgactgtgctcatgctccccatgatcatgctcttcgtgttcttcttcagagccttccattaaatcaatgcctttgcttgcattaacgaaaacggcatggccttggcccatgcttttttcagctgacggaacccatgtctccatgtattcactattataaacgaacaaatcagcatcctgaatgttggcaatgtctttcggcgtcggttcccaatcatgcggttcaacggaagatgggattaacagatccacatcgcctttgtcttttacaatttgttttgtgaattcatacatcgggtagaacgttgtgacaacgtgcagtttatcaccctttgaatccgccgacccttttgttgatgagttgccgcatgctgcaactaataaaaagcacgctgcaatcacaaacaaaccgctccattttttaaacatatcgtatatcccctctttttcagtaactttaaatcaaaatgataacgattttgtaatcctatatcataataaaccgaagtcattacgttttgcaagaataaatttcattttcatttattcttcccgcctgcagagcgaatatatgtactaaaaaaacccggctaaaaatgccgggctacttcaatcattagtttgttttgtccagaagatagaccctgctctcataaggccggaacaccatttcgtcatcaagatcatcgttgttataattgctgagaagcagtgaggcctgagctttgccgcagttcttaggccactgaaaaacagcctgctcttttgaaaaattattgaccgacaaaagctgttgtttactgttttctctcatgtatacaaacaactgcggatcgtccggaagcaaaagatcaaagctccctttcatgaggtcagcgtactgctttctcaggctgatcagctttttgtaatagtttaagacagaatcaggatctccctgcgcttcctccacattgattgcggtgaagttcggattgaccttcagccaaggcgtgccgtcagtaaatccggcatttttgccgctgttccactgcatcggggtccgggcgtgatcccggcttttggctaagatcgatctcatcacatcatttggatcatagcctttttcaaacacccgtttatgatacatattgatcgtttggatatctttgtagtcttcaatccgggtgaacggcgcgtttgtcatcccgatttcttctccctgataaatatacggcgtgcccttcataaaataaattacggctgccagcattttcgctgatgctttgcggtattccccatcgtctccgaatctggacacaatccggggctggtcgtggttgcaccaaaacaatgtattccagccttgatgttcaagcttcttttgccattttgtcaaaaccgattttaaatcagaaagctcaaggggcttcaaatcccaatgttcttttccgggctgctgatcaagctccatatgctgaaagtgaaaaatcatattcagctcatgcttatctgttcccgtatatttcaggccttcttccggtgtgacactgccgacctctccgacagacatgacatcataatgagaaaacacttcatctgtgatttcttttaaatagtcatggattcgttcgccatttggctgaaagggcttcggctctgcctgctgattgatatagtcctcatacgaaggaagatattctttcttagaaatgagatggagctgatcaattcgcaaaccgtcgacccctttatcgagccaaaatttcatcatgtcatacaccgcctggcgaacttcgggattttcccagtttaaatcagcttgtttgacggcattcatatggagatagtattctccggtgtgctcttcgtattgccagaccgggcatccatagtttgagagccagtccgtcggcgggccgttctttgtgccgggacgccaataataatagctacggtatttgctgtttttgtccagctccgcttctttaaaccacggatgctcgaccgaggtgtgatttaacacaaagtccatcaccagctttaatccccgctgatgcacctggtccagcagctcgtgaaaatcgtccattgttccgtaagaatccataatcgccttatggtttgtcacatcatagccgtaatcaacattcggagaaggatagatcgggcaaatccaaatcacatctgccccgagctcctttatgtagtcaagacgggaaataatcccccgcaagtccccaattccgtctccattgctgtcctgaaagcttctcgggtaaatttggtacaccactgcatccttccaccagtctgttttcatcccgcaatccccctgttttgtcttctattcaagctgagatggataaagtgtcattccgccgtcgacgaaaagtgttgcgccggtcacatagcttgcttcctcagatacgagccaagctgctgctgccgccacttcttcaggctttccgaaggctttcatcgggatttttttcaattgtttttgcctgctctcttcctttttcgtatcaacatttgattctgtggcaatggtgccgggcgctatcgcattgacgcggattcccttatccgcataattgagcgccagcgtttccgtcatcatcttgatgccgcctttggatgtggaatactgaacgtttacagggcgcggaatctgctgatgaacacttgagatattcagcacattgcccttgatattgtttttcatcatgtggttaagtgctgctttcgctcccagaaaggttccggtaacattgacatcaatcactctctgccaatcttcaagactcatctcatgcggcatcgcctcaacgccgttaaaaccggagttgtttaccatcacatcgagcgtgccgaaatgctctaaagctgtgtccaagagcgcctgaatcccctcttcttttgacacgtccgcctcaactgagacggctttccctccgttctgcttaatgatttccagagtttcatctgctccagacgggtcgctgtggtaatttacaacaacattcattttctcctttccgaaccgttccgcaatggctttcccgattccttttgaagaccctgtcacaatcgctgtttttccggttaaatctttgtacatacttgatatcctcctctgtttctcactatgcagtggaaaataccctgtttttccgagttgaaaacagcacaaaaaaagcagagaacctgtagttctctgccatttcctattgaaaacgctgctcggcaagcttctttttaatattcatcagcctgcggtaaaagaaagcggcggactcgtaatgttccaactgattgaaacgttccgctgtatcatgcagcagatcttcggcgtcagcaagaagctgcctggattccagcaggtcaaagcattctgtaagcacgttcaggtcgccgcttccaagatacagctcatgaatgaggcggaatttcgtcaagtacatgtcatcctcccattcagccgcgctctttatcccgcggtcataagcctctactgccttgtcgtattttccctctttacagtagatatgggtcagtgaaaatacagcttgaacagcttgctgaaagttgtgctcctcaaaaatggcggcggctgttttgaaatagccctccgcttctttgtaatcacccagactgtacttacagtgtccgacattataataggcagcagcgatcatgtacgcttcttcaagctgcctggcatgttctaaagcgctgcacaagtgggtcagtgctttttcatgatgatacacatcggtcaaatttccggcgatgataaattcacactgaacccggcggcgaccgtacagttcatatttcgtatagatatcaagcgcctggctcgcataattcatggaaaaatacgtttgtttgatgtgataatacacttctgcgactttaaaaagaaactcagctttttcgatctcatcctcgacatactcgagcttttcctcggcatgtttataatggtcaatcgctaatatgaaatttttctgcttgaattcgtacattcctctgaaataataaaagtagtattccagtaagcccgtgagtttttgctgattgctttcaatttcgttcagcatatcagagaacggaggcttggtatcgctgtctttcaccggcatcagcttatcaagcatgattcgatgccggaattccatcaaagaaaaatataaaagcaagtcctgattctcttccatatcttctaaatcatattcaatctcctgctttaacgcttctgcttgatctgcttcaaatgcgcgaatgagcttgtaccattcattcagctttactgctacttcttctgatggaatctttgctctcatcggtctgcctccttcctcctgctactatttatgttatattttatcatagctgttcgcttttagagagagtcaatcacttaaaagcgttaacattcagcacatcttgagaaagtgagaccgatatgaacttacccgcaaaaacatttgttatcttatgtattctatttcttctagatctttgttttagttatattcggcatgaatggcattctcaaaacgccttgcaggacatgcctgtcccctcggatcttcatccgattgtgaagcagaatgccgatgcactcaaagccgctgcagcgaataaaggcattgacgtcgtcattactgaaggattcaggtcctttaaggaacaagatgaattatataaacagggacgtacaaaaaaagggaatattgtcacctatgcaagaggaggggaatcgtatcataactatggtttagcgattgatttcgcccttcaaaaaaaggatggcagcatcatatgggatatggaatatgacggcaatcaaaacggaaaatcagattggctggaggttgtcgagatcgctaagacactcggtttcgaatggggcggggattggaaacgattcaaggactacccccacttggagatgattcctaactagacacccctcacagccttttctttttccttatgtgcgcatcaatataggaagggtaaaccggcttatagacaagtttgcagtgctggtcactgcctgctgtaaaatcaggctgccattccagtttcacatcaaaagcggctaaaaatgcttctttcgcttcttcagcggaaacatccggcctgtgatttatcgcttccaattgttcaggttcaatatcaggcgccataaaagcgtcaatcaacccagtttccggattgacaatgatgcgggcagcgccgaaccgcagcggcactcctttataccagacagaaaaatggttgcggactctccctctttcatcaattcggacgggattcaccctgaaaaactcagccgctctcggatagagggcatacaaaaattgaagcgctatctcttggcattcttccgtggagcattggaggttgttccgccagtccataaaagaaagcgctgcttttaattttccggttcttttatccgtcttcattttgattgtatttttatttctcgtttcaaaatagcttcctatgcttaaatccttacgctccggcgcagcgcccctgcgccacgtgcttccaatttgttctccaaagtctctttcactgactttctgcatatcagaggtaaaacccagcaaggcaaatatatcaacttcttccttgttctgaagcggcggcagtggcgccgtgttttctattctttcatctgcgatatgctggtcgggcacaatttcgtctacatctgcgggatagctgtatcccggtagaatcggttcatatacaagccttggttcctgttcgccatcaatgacatcgtacatcagctcaaaagacattgtgtttaagtaatgggatacaaccttctcttttgctacaaattccgtcggaacttcggctttatgcccttccccgtaatatagaaagtggacaatctgaccgcttcgtgtcatatcaattaaaaagcctgaattgggaatcggaagccccagctccattttggtatagacaaaccggatgtgctgccccctttcttccttgccttgaaaatgaaaattcataaatgtgccgggatgattggcagcggcaaactgaagagccgtcagcttcagctcggcatctggaagttttttgtctgtctcggagtggacagttgttgaaaaggtgagcaaggcgccgtcatttctaagttcaactgtaatgtgcttttccggatctttagggtccttccagataaaatatgcctgcccgtacttcttttgcttttggtcgtaatcttctatctcaagctcataatgcgtcggtacatttccgatctcctgcgccttctttttcagctgtttattaaccaatgaagtcatccctttcaaagagtctacgacaaagagaatcctgtttattatataaaaagacctttcttcatttaaagtgaagaaaggtccttttctattattgtcattgttttttgagattctttctgttactttcatcacatactctcttctatatctgaggcaattgcgtgacttttggctgtttcaccatatgctgaagacaggctcccctgtatgtgcatcgataaaatgcggatacaccggcttatagacgagccggtagctgtgttcttcatcatccccgtactctctttcccagccaagctcaactttaaaatgctgccaaaagatagacttggcttgttcaactgaaatagccggcacaggatcaatggttgccagcttatttgggtcaatatccggtcccatataaacggtgatataccctgtctggcggctgacacaaattctgatctgcccaaatcggagcggaactccgtgacaatgcgcttcaaacgtaaaaccagcgactgcgttttcttcttcatctttttcgtcgtatctgatcctaaaatattgatcggcattcggaaataaagcaaatagaaagcgaagcgcgattttttcacactctgccaaggttactgtcagcggcccttttttctccataaatgacatgacgccttcgagttttccggtttctttgttatagatggttttcagcacttgatgagtccgtcccttaaaccagctgtccatgcttttatccgccggctgatacacagggtcatccggattccgccaaacgattccaattctcccatctcccaaatccgcttcccgctctttgacaaacccattttcaataccaatcatgctgtcaggatcggccttttcgcggatgccctcgaataaagggagaggaaagctctccggctccctgtaatcatcgtcatcatcaactgcttgttcttcttgaaccaaatccgcaggtacggtaatcgccctaccttcaggctcgtacaccaaatgcggctgatcatctccgtttttgtaaacagaacgatggagaacctcaaacaaaaggtcgaactccacgtccttcttgataaaggcaagtgcctcttcaacatccgcgacccgctttggcttgatgatgctgcccgcttcgccgtaataacggaagtaaacaatctcacctgataaggaaacatcagccataaatccgctcatggggagaggaagcccagcctccatttgaacatatgaaaatctcactttatcgccgtatgcacggtcattttcttcacgaacaaaggcagagagtgcccccggatgatgagtctcgacaaattggcgcatgatatcctctagtttctcctcagacagcctttctccgctttcaggctcaatatcacgggaaagggattccagctctccgtccggtccaagctccacgataatgccggtattctcatcctgaggatctgcccaacaaaaatgagctcttttatcatcaccgccataatcttcaatttccagttttaagtgtgtcggcacccggccgatttccagtgctttttgtttcagtccctctttcttcacaaaggcggcccctttcatccttcttaagttccctccaactaatcaaaaagtaatagtctaaaatacacagttttctgagtttaccagttttaccagaacatttttcaccaaaaataggatgatgaacctattcaatataaaagctaataatcttaaaattaattccgttgtaactttttataggtccattcatgacaaaggagggcggagtttccagaaaatccggtgaaaaccgtgagaaaagaactgatttttttggttatatgatgctaatccattcaaaaagatccatttctcaaagacaaaagactcccctttcctaaaccatttgaggaggaaaaatgaatgtttcagaaaaaaacgtacgctgttttcctaattcttctgctgatgatgtttacagctgcttgttccggcagcaaaacaagcgcggagaagaaagaatcagaaacagaaaaaagctcagatatagctcaagtcaaaatcaaggatgtctcttacacacttccgtctaaatatgataagtccacttcagatgaccagcttgtgttaaaagtcaatgtcgcggtgaaaaacacaggaaaagacccgctgaatgtagacagtatggatttcacattgtatcaaggtgataccaaaatgtctgacacagaccctgaagactatagcgaaaagcttcagggcagcacgattaacgctgacaaatccgttgaaggaaatcttttcttcgttgtagataaaggcaagcaatacgagcttaactatacgccggaatcttacggtgataaaaagccaaaatcagttacttttaaaattgacggaaaagacaaaaaaatcctggcgacggcagataagctccaagattctgcaaaagcgttatcagcttatgttgatgtccttcttttcggcaaagataacgccgatttcgaaaaaatcaccggcgctaacaaaaatgaaattgtaaatgattttaatgaatcagccaaagacggttatctctcagcttccggcctttccagcacatatgcggacagcaaagcgcttgataatatcgtgaacggcattaaagagggattaagcaaaaactcttccattcaagcaaaaacgacttcaatctctaaagacgaagcaattgttgaagccacagttaaacctgtagatgcatcttctctttcagaccgcatcgaagacaaagtgaaagactactacagtaaaaactctagtgccagctatgaagaggcagtgaaatacgcgcttcaagtctatcctgaggaattcaaaaagcttggacctgcttcatctgaaaaaacagttgaagtgaaaatgaagaaaaatgacatcgaccaatggcagcttgatatggatgattacagagcagcagaattagtcgaagcattcatcaaagaataaaacaccaaaaggaaatagccatgacggctatttccttttttatttgaaaatgtcgctgatgaaattcacttcatcttcggtcagttcaatgttcaaggttttcaggttatcctgtaattgctccggtcgtttagctcctggaataatggcatcaatcgccggtctcgttaacagccacgccaaggcgacatgtgccgtatccgcttgtttttcctccgctactgctttcagcttatctacttttttgagattgtggataaacgtttcaccctgaaattgaggtttatcctttctgaaatcatcaaagactgtgtcttgcgtgaattttcctgtcagcagtccggacgcaagcggaaagtaaggaataaaggagatgccttgtttttcacagtatggaagaagctctttctcggcatcacgctgtatgagagaatattcggcctggaagacctccaaatagccgtcagcattaaaatcctgcaattgctgataatcgaggttcgaagcgccgatcgctttgattttcccctcatccttcagctctttcaaagtgcccgccacttcagcgagaggtgtttttccatccggaaagtgaacataatacaaatcaatgtaatctgttttcagccgcttcaggctcttctccacctcgctgcgaagaaactcccggctattgtctaattcaatgctgccgtccacttctttatgagctcctttggtggcgatgatgagctcattccgcacgccgcgttcctgtacgacttcgccgattaattcttcagatcgccccaatccatatataaaggcggtatcgataaaattgacgccgccatccaatgccgtgcgcactaaatccttccctgtttcatcatttagatttggaaatagattatgcccgccgaccgcattcgcgccgaatccgatccgcttcaccttcagcttcgttttgccgagtgtacgtgtttgatccattgttccttctcctttgaaaccaattttgatgaaaaatagtgcagggtcactttttgtattagatatcctttttctattttccttcttttttcaggatatacaaaaaggagaaagtgtatttctcctttcgcaagtttattttggaagaacccatttgtctttcaggaagcaggctctggctagtaaaaagaagatggcgatgagcacggcgatggttcctgacgtagacaaaatggtagccgggtcaaccatcccgaataaaagctgtttaaataacgcatgcaggttcagaaacgggatgagaaagtatgataagtcaaattggttcggtgccttgctgaagatgaaaaacatcgggaacacaggcagaaagacgacgagagacatataactttgcgcttcttttaccgagctggacatgatgctgatgaaaagctccatcgcagatatcagcaatgcagagagcacaatgattaaggctgaagcgccgattacactccacatatgatctcccagctggaaggccgtttttaaattttcggtaaataacacggtggacaaaatcaaaaacaccaaagcaaatacacctgaagccacgccaaaagtggaaaccgcaagccacttgccgaccagcactttgtttctgctgactggcgttaatagcagcgcctcgattgactttcggtccttttcaccggccatgatatcaagagcgatcggcattgcgccggaaacaatggaagtcagaatcagcatgggcagaatggcggaaagcataatagcggaagtccctttctcctcatccgcttccttttgctgaattgtaaacggctggatcaccgattgatcaatatgcttatttgttaaacgttgctgcacaatttcatttttgtactgatctaaggcagactgcacaagctgcatggcatttgacgacccttgatcgattgaattgccgtaaacatcaaccttaaaaggtgtcatgctgttgacatatgagtcgaactctttcgggacgttcagataggcatctgcttttccttcatcaactgcctcttcaggctttgcaaatgtttttacgctgatttcgtcaatctcattaagcttgctttccagtgcgggcggaagcgaatggccgacagccagcgtgtactgctcccctttgtcggacagcatgctttcataaaaaaagacaagtccaagcatcataatcatcggcactaagattgtgagtaatatcgtttttctgtcgcgtaaagcgtcgatcatttcttttttataaatatggctcagcatttaagaaatccccctgacaagcttagacataaagatgtaattcaaatcctcactgcgctcgctctcgtatagtgattcaagcgcccctcggtaaatcacctctccgctgtgaatcatgatgacactgtcacagagcgcctgcacttcctccataatgtggctggagaaaagaatcgttttttgttctcttttcagctgctgtataaattcgcggaagatgttgcttgacgtaatatcaagcccagttgtcggctcatcaaataaaatgatgtccggatcgtgaatcagcgctctggcaatggcgactttctgcctcatgcctttcgaaaacccgcccactctccggttcatataatcgcgcatgccgaaccgtttcgataaatcttctattcttgctttgatctcgtggcggttcagcccatacagcctgccgaagtattggagattttctttagcggtcatcctgtcgtaaagcccggtttctcctccgaataagacaccgattctttgtttgacctcagccggctgcttgaccgtgtcaaagccgtctactgtgattacaccctgtgatggttcaagcaaggaagcaatcattctcagcatcgtcgttttgccggcaccgttttctccgagaatgccgacgacttctcctttttcaattgttaagcttacatctcgcaccgctttgactacttttttcttatcctgaaacctgcggctgcaatcggtcagtgtaatcatgtcacaatctcccttatctttatttctagtaatgactatatacgaaaagctggattagttggataaagttgtcgcgaagagttctttttatgtcgtgaaatgggatagaataaagatgattctatgtaactaggggaatgataatggtaaaagtcggacttgtagatgattatcgagtagatttagagaagttagaagcgatcgtgtccagaatgcaggacgtcgaaattgtcttttccaccgattcagcgaaggaagcctacaggcgggtaaagaacggagacattgatctgctgcttgccgatatcgagatgccccatatgtctggctacgagcttgctgatttgatcaaatcccattcacttgatgtggatgtgatttttgttaccggccacggcggttatgcggttcacgcctttgacctgaacgtccatgattatattatgaagccgtactatgccgaccgtctggccgcttccttcgaccggtacttgaaaaagaaaacggaaacgagtttgaatgggcgtatattgataaagcaaaagtctgaaatgcacgtcctgcaaaagaaggatattattttcgcagaacggacgggacgttcgacgacgattgtgacaaccgccgaagaggtgcaaacgtatcaaacattaaatgatattaaaggcgacctgcccgaaaaagattttcttcgttcgcatcgttcctttattatcaacattcattacataaagcatttttccgcttataccaagcattcattcacagtttcctttgagggaacgtctaaaaaagcgatgatcactaagcagcagcttgattattttcaaaactactatttttgaggagtttagtacgtgattaccctttttcaatgtctttatctgattttatttagtttcatatgttatcagggagctgctgctttttcacacagcacagccgcctcttggctcgccgctgctttaggcgcagctgctgcaggattgtacatttggaatacgaagcgggtgtggaaacactgttcctcagggctttgtgcgtggattgcggtgattcaagtgatgtcggtgggagtggtgttgattggcacagacatcatgccggtattatgtgtaatcgcgatatttgcagggtgtgaagggctccgtatcggacagtctgctttgcaggcaaggctttctgatcaaattgataagctgactcaagctgaacagcacgccaatcaaatgctgattgatgtcagaagccggaatcatgacacaatgaaacatatcactgcaatcaaatcagctcagcccaaggcagatacacaagcatatattcaaaactgggcggatcaatacagccaatatgaccgttttttgaaaggagagaacgcgtacgttgcaggggtgctttatgattttttagaaaaagcccgcgcctcgaatgtgagtgtttcgctgcatatgcatacaccgctttcttcccttccgttttcgcctgctgatcaggtcagcttggtcggcaacatattagaaaatgcgctcgacagcgcggcggaggcccgagaaaaagcagagattaaactggagacttcactgcgcagcgggctttatgtactgacttgtgaaaacagcactcccgggatggacccaaaagtgctcgatacaatttatcaatcgtttggccgctcaacgaaaaacggcgctcatgaaggcatgggcacatatatcattcaaaaactggtgaagggcgcttttggcaggctggattttacctaccgccaccccatcttccggttagaaatcaaaattccgtttcagaaataaaaaaaccttgaaaagcctggcttttcaaggttttttccattatgaggataacgcttgtgcaaaacgatctgcttcatcttgcagcgtgctttcaatttctttgtaacggctggaaatcgttgatgcgctaacgccgtattttttcgccagtttagcctgggaaacggacgcgccgttaagagaaattgcgtttacataatattcaactgccgccgcaaaagcttccggctttctgatgacaggtgattttttctcgcagaatgttttccagatgtcaataacagctgggatcaattcagtcggatactcttccccgctcatgccttcttcaatagccgcagcggtttctttctccaagtcgtttgcccactcaacagtgcttacttccgctttctctgcttgtggctcttcatctttctcagctaacaacgcgaacagaacgttgttgaattcctgcttcatgaagtcctccggcgttttgccgtccttcacagcggcatccgcatatttcttcaccttgctgatcagcgcttctgttctcttcaccgggaagatcgtgaactgcatgaagaattctgctttttccgcttcgtggattgggtatccaagaatcaggcttcccactggaggaaggtcttgattgctggcgtccatttccacttcgaattgttttgccgtaatgacatcttcaaagtgaatgatgccttccttcaggtccttcagcagcaataaagcaggcgtcatgctctgccatgattctacgatctcacgcgttttcggacgagtgatcgaatcgccttttttctgaaggtactcttcgaagattgtcttctcaccagcaagcgggtggaagaagattccccagattcctaagttaaatacgctgatgtctttcgtctgtctgtccatagcagaaagaaaatcatgctggttgataaagcctgaaatgctttctctatgtactgtgaaggcatactccactaagtcttcctgaatttgtttcgcttcttttgccgctagttccgccgggaagtcgacaactttacttccgcagcattttttatatttcttgccgctgccgcatgggcaaggggcatttcgtttcacttttcccacaataaaccctccgaattctgttgtaacttttctattttaacaaaaataacttctgagggcttggtttcgggctaaaaaagaatttggtaatgtgataagctggctgattatgccaatttacctatgacattttcaccaacttttgtgatttaaggcttatcacctattcccactttaggcccttcttttttacaatcattaggtgtttatttaacattttaaggagtgtttctattggaactagctggtttcatgctgcgcgcctgcgctcttttacttgatgtaatcattgccgcagcagtgattttggcagccggatttacgtttggcgatgggtccgccggtgtcattattgtcgccatattgatgctgattgtgtaccctttgctgatgccgctgacaaattggaagggcacactgggcaaaaaaatcatcgggctgcaaatcgtgagggacgaaacatataaaaaaatatccttcccgcaagccattgtccgttacctgatagcgtgggtgcatgtgttctcccgcctgatctatttgactgccgcatttacgaagaaaaaacaaaccgttcatgatatggctgcgaaaaccattgtgctgaaagcagaataaccttgaagaatagcattcttcaaggttttgtttttcattaattcgtattctggcccccgccgttcagcccttctttaatcaggctgttgacttggctgctgtacagaaggccgatgtgtccaacgccatggatttgaacgtttctagcaccatctaatcttgataagtaattcatgacaatcatatcggcactgctgtaaatggatgtgtataaaatcttttgatttggatctgttcccggaagcgccttgcctgtcgtcaaacggttcgcgccgccaagcgtcacgacgtttgcaactttatttccgccgtccagattttttatgtagtaaagtgtgttcgcgccccccatgctgtgagcgacaatatccacttttttcgcacccgtttcatctaaaaccttttgcacaaatcgtgataataccggtccattgttataatttgtgcctgtcttgtcccaaaaatcaactgcatacagcttgtcccgcgaccagccctgagatacgagatagctcttaattcccgcaaaattgaatgatgcccctccaataccgtgaaccataacgactggattgtgttcagcggcttttgctgacggctgcaacgcaaacagcgatgtaacagacagcatcaaaattgttacaagtgcaatgatccttctttttacaaatttcataatatcctcctttttttgtaacaaattctccaattatattacgttaccaaattaattaagtaaagggtaattttggcttatttttaaagaaattttaagattcagaggtcattattggtcctaaaaagccaaaaaaaagaaggcttattcgccttcttttcttcaatactcattgaaataagcttggattttttgaggatcatttgttttggtaagcgcaagcatcagcaacatccgtgctttttgggggtttaaagagttcgatgccagcaagtccttttccgcatagtcttggtttggtgtgacgacaccatttcccgtgcgggtagagcgcaccactgtaacgccttttttgactgcgctgtccgcccctttttcggctgcatcagataaagacccgttcccagaaccggcaaatacaatcccctttgctccggcttttacagcagcgtcaaacaggtagcttccgtcattttggtatccatagataatgtcaacctgcggcagctcatcaagattagaaaccgagaaatccgtgtccttcgtatgcttacgggtaatctcattattaaaatagatatcatctgcaattgttccgacgaagcccatttcttctgatttaaatgtatctgttgtagttgtgtttgttttggtgacatatcgggctgaggcaatccggtcgttaagaacaacaagcgtccctttcccttttgcctcaggggcacctgccactttcactgcattgtacaggttagaaggcccatcagcgctgatggctgtggaaggtctcatcgaaccgacaataacaaccggtttatcacttttcacggtaagattcaaaaaataagcggtttcctccaatgtatctgttccatgagtcacgacgattccgtctacatcatctgaagcgagcaagtggttgatgcgtttcgccagcttcagcaatattttattatcaatatttgtgctgccgacgttaacaatctgctcgccgctgacgtttgcaatgtccttcatttctggaactgcctcgatcagtgattcaacgccgacaacacctgctttatattcagttgttgaggttttcgattgatcggcaccagctatcgtgcctcctgtcgctaaaattctaatgtttggcagatcctttttttcagaggcagaagccgaagagactttttgtgtctgagctttttctttcggggattcttttgtttcaggagaatgtgaacatccggtaaaaacaaacaatagtgcggtaaaaagtacgagcattcgttgttttttcatctatttctctccttacatccatatgatgattaatcattgtacattttatctattcagtcaaaagatcagtcagcttttctctcagtattttttgttgtcatatccttctttttttgtcttttcatacaatgaatttttcttgacaattgatgattgaatcaagataatagaccagtcactatatttttgattgcaattcagtaaggtgggaatgttatgagttatggagattcccgtgagaaaatcctttcggcagctacccggctttttcagctgcaagggtattacggcacggggctgaaccagattataaaggaaagcggcgcgcctaaaggctctctttactaccactttcccgggggtaaagaacagcttgcgatcgaagccgtgaatgagatgaaggagtatatccgtcagaaaatcgcggactgcatggaagcctgcaccgatccagcggaaggcattcaagcctttttgaaggagctctcctgccagttttcatgtacggaagacattgaaggcttgcctgtgggcttgctagcggctgagacgtcattgaaaagcgaaccgttgcgcgaagcctgtcatgaagcctacaaagaatgggcctctgtgtatgaggaaaaactgcggcagactggctgcagcgagagccgtgcaaaagaagccagcactgtggttaacgcgatgattgaaggcggcatccttttatctttgacggcaaaaaacagtacgccgctccttcatatctccagctgcattcctgacctgctgaagagataaaaaaaacgacatactacatgcagttgatagagaggggaaatgattttggaaacaacagctaaagcatctcagcaatacaaagtgatgccgattatgatttccttgctgttggccggttttatcggcatgttcagtgaaacagcgctgaatattgcgttaaccgaccttatgaaggaattgaacattacagcggcaaccgtccaatggttaacgacgggctacctgcttgtactcggtatccttgttcctgtttcaggactgctgttgcagtggttcacaacaagacagctttttaccgtgtcacttatcttttcaattttaggtacattcattgcggcgcttgcgccgagcttctcgtttttattagcggcaaggatcgttcaggcacttggaaccggtcttttactgccgctgatgtttaacacaatcttggtgattttcccgcctcataaacggggtgccgcaatgggaacgatcgggcttgtcattatgttcgcgcccgccatcggcccaactttctcaggattggttctggagcatctcaactggcactggattttctggatctctcttccattccttgtgctggcgcttgttttcggtatcgcatatatgcaaaatgtatctgaaacgacaaagccgaaaatcgatgtattgtctatcatcctgtcgacgattggcttcggcggcattgtattcggattcagcaacgcgggtgaaggctccgggggatggtccagcccgactgttatcgtgtcgctgattgtcggcgttgtcggccttatcttattttcaatccgccagctgacaatgaagcagcctatgatgaacctccgtgcgttcaaatacccgatgtttattttgggtgtgatcatggtgttcatttgtatgatggtcattctgtcatctatgctgcttctgccgatgtatctgcaaggcggcttagtcctcactgcatttgcatctggtcttgttctcttgccgggcggtattttaaatggatttatgtcccctgttacaggccgcttgttcgataaatacgggccgaaatggcttgtcattccgggatttgtgattgtcaccgttgtactatggttcttctcaaatgtcacgaccacttcaacagctgtgctgattatcatcctgcacacctgcttgatgatcgggatttctatgatcatgatgcctgcacagacaaacggtttaaaccaactgccgcgtgaattttatccagacggcaccgccattatgaacacgctgcagcaaatggccggcgctatcggaacagcggttgcggtcagcattatggctgcaggccagcatgattatatgagtacagttaaaaaccctgccgatccggcagtcatcccgcaagctttgacagcaggcgtacagcacgcatttgtgtttgcaatgattgttgccattatcggtttaattggcgctttctttatgaaacgcgttaaagtagatcattaatatgaaaagcccctgactagtgttcaggggctttttcatgtttacttgtggatcgttttcgccgcgatttcatcaatcgcgtgccgcatttcctccttcgtattataaaaatggggagcgagacggataacattttcccgcggcgcgcaaatcacttttttcttcttcagcaaccccgccgtttccgatgcccgctcatcccggatcgcaaccatgcccggctgaatcccaccttgtgccgccgccagctgcaggcctttttcagcggcatattgaactgcatcggcacagatcgttttcacatgatccctgatatgagaaaccccaatatgattcagcagcgataaagccgctgcagctgcgtatacgctgataaaagctggggtgcccgtttgaaaacggcgcgcgacttttgcataagccccatcaaatccgctctctcttccgaaccaagctgatgctttcggcttcagtgcgtcagccagctcctttctcacataaagaaacgccacacccggtatgccgagcaaatacttccgggtgcctgctgccagcatatctacgccccattccttcacatcaatgggaatatgcccggctgattgataagcatctacaaacaataaagagccctttctctgagaaatctcggcaatcgcttttatatcctgaacatagccgtcacgataatgaacgtgaggaacacacgtcagtactgtttcatccgaaatatgcgtttcatattgttcaagcggcagcacgccgtctattgatggaatgacggatacggtataatcggagtgtgcctgccaaacatgaggcaccgccggaaaatccatatctgtatatacaacgtgcttctttccaaatgcagttaaggacgatgctacagaaaccagtgcatcagaaactgacggcacaatcgccacttcatccggttcagccccgatcagctttgcaaactcgtttctcgcaaactctgttttttcaatcgcttctttccagttcgtccctttatacagcaggctatcataataatcctggatcgcccttgatacaggctctgccaatgcgctctgagaacagctggcaagcatcgtatgcgtctgcaaggttgggaataactggcgatactgctccggcaaatgctccattatgattcactcctttacattattttgatgaaaaacccataaataaacaatagaataaaagaaaaaggagatgggagaatgagaaaaaaagtgctgatcacaggctttgacccttttgacaaagaaaccgtcaatccatcatgggaagcggcgaaacggcttaatggcttcgagacagaagaagccattattacagcggaacaaattccaaccgtctttagatccgctctggacactctgcgccaagccattcaaaaacatcagccagatatcgtaatttgtgtcggccaagcaggaggacggatgcagattacaccggaacgagtggcaatcaaccttgcagatgcgcgaatccccgataacgaaggacatcagccgattgatgaagagatttctccagatgggcccgccgcttactggacaaggcttcccgtgaaacgaatgactgctaagatgaaggaacacggcattccagctgcggtttcctacacagcggggacctttgtatgcaactatttgttctacgggttaatggatcacattagccggacatccccacacattcgcggcggttttattcatattccttacattccgcagcaaacaatcgacaaaacagcgccgagcctcagcctggacacgattgtccgggcattgagaatcgccgctgttacggccgcacaatatgatgaggatgtgaagtcaccgggtggtacgctgcactaagcggccgccgctgtttcttccctcatcctctttttgtagacaaacgccgatagggtgacactcacttcaaacaggacaagaagcgggatcatcacgagaaaatcagaaataaaatcaggcggtgtaatcaatatggacacgacaatcagcagaaaataggaaagctttctcgctttggccagtctgtaaggatttaagatgcccagccttgttaaaaacatcaccaccaagggcatctcaaacaagaagccgaacggcaggctcaaattcaccataaacctaaagtagcggtcagccgtaaacatcgtttcaaagtggccggaggataaatgagtcaaaaagctgagcacgatcggaaacaagacaaagtatccgaaggagatgcccgccaaaaacaacgcaaataaacctggtatgtacatgagcgtcaccttgcgctccgttttagtcagcgccggtgcaacgaaacgccacagctggtacgcggcaacagggatagaagccgcaatggcacaaatgccggaaagcatcatatacacccagaggatttcactcggtcctagcacagccagctttccatccaaatccctgatcagccagtcataaatgtcctgtacgaacaaaaaagccgtgatgagaaatagaaaaaatgccgcaagggtgacgataatccggcggcgaagctcttctaaatgcccgatcagatgggtttcttttttatccattcaaaaaagccctccctttcataaaaaaagaggcagacccggtgtctgcctcatcagcattcagcccgcgtttttgtcctgctttaccgctgtcagctcagctgatttctcttctttttcatcaccagacacaagtgattttgtggcgcttttaaattccagcagtgtccgtccggcggcacgcccgatttccggcagcttggaagggccaaaaataatgagggcgatgacgaagatgagaatcaagcccggtattccaatgtttgaaaacataatttccactccttaattcgtgatttttgcacgcttcttaatcatttgtttttcgtgggctttgttgtgcgaaaagaaacgatcctcttcgacctcatcggattgcttcaccccgccttggattgttgtggatgatacctttctcaacccggtttggtctttctggtaaacgaatgaagcccgcgtggaaatggctgcgcccggctcggtcacaaatggcatcacccgataatcggctttccactggtgaggcgtcactgtacagcggacatatccgcgatagtcgttaaagaactggatgtgcggattttcttttaaaatttggtccgtatccgctcgcttatccgctccgttccctccggaagtgatcgaggttccaacaaattcggctccgaatatttttgaacttgtcttctcgaaatcgacatgcaaattcgatgcccagcttgcgtgtacatcacctgtcagtacgacaacattattcagatttttgcttttaatgaaattgataacccgttcgcgctgagccgggtagccgtcccacgaatccatgctgtagatcgggcttgcgcttgtcccgaaattccacttggcaaagaaaatctgctgcgccagcacattccagtgggctgtcgagctgcccaaattgttgaagagccactgctcctgttcttttccaagcagagtccgattcggattgcgcgattcatcagaaggcggcttattgccgtcgttattggcttggtcgtccctgtactggcgggtatcaagcacattgaaggacgccaggtttccgtacgtaaagtgccggtacagctgcatatctgggccattcggcaaagaggaaatgcggagcggcatatgttcatagtatgcctggtatgctgccgcgcggcggagcacgaatgcttcaaccgactgtcctttttcaggtattttattggcatagttgttttcaacttcatggtcatcccaagttacaacccaagggaatgccgcatgtgcagctttaagattggcgtcagaacggtattgagcgtgacggttccgatagtcttgcagcgtaatgatttccgcgctgttgtgcgtgcggacattgcctgtttttgatacatattcatttgggccgtattcatatatgtaatcaccgagatggaagacaagatcaagcttttcctttgccatatgcttgtaggccgtataatatccgtgctcatattgctggcaggaagcaaatgcaaaggtcatttgcggcacattggcgccaggggcaggcagtgtttttgtttttccgacagggcttagttcatggccggttttgaaacggtaatagtacactttgtttggctcaagcccgtccgcttccacatgaacggaatgggcaagacttggtttagccatttcagtgccttttcttacgattttgcggaaatgctcatcctttgcgacctcccatttgacaggcactgcttgcttcggcattcccccgccattcagcggatctggtgccagacgtgtccaaagcacgacactgtcagaaagcggatcacctgacgctacccctaatgtaaacggatagcttgagaatttaggcgcagcatttacttcaaaggccccaaccgactgggcaatcgttaatccaagagaaagtcctgcaatcttccccgctccttgaataaatttgcggcggtcaaacgtattgttttgaaagctttcctctttcagtttctgtacccattcatcaaaacgactgtcgtatgccattcaagatcccctctctcctcattgatcgtctccattataggaaatcattgttaaacgactgtgaagaagtgtgaactgattgtaagcgctgaacattaaaaacaggtcttccctcacaagcctgctgctgaaacatgccgaaagctggctgaatgacgcgttttctgcatatcctgtcgtttgcaagccgcccattcggcctatttttcttcacatgatcttaaaaaaacaaaaacaccgagccatttcgcagaatgactcagtgctctttatcagttatttcgaaaacaatctgctgaaaaagcccttctttttcggcttttcagcaggaggctcttgttctcttacaatccctttttccttcgcttctttcagccaaaatggaaattcagcaagcagagcatcataaagctcatcatcagaaatgcggtcaatctcttcgatatgcaggaagttcgtgttatcaatgacacgcccttctaacgtatccagtttattgagaaaatcaaagtttccgtttccgatgccgacaaactgccagaacaccggtttatcagaagaagcttcaattatcggtttgattgactttttacagcccccgtcattgataaaaacaatgaaagcaggatacgagctcggttcctccgtaacatatttgcgcagcacgtccttcatgactggcggctcatcatttctgccgaatttatgcaagcggtcattatttaaaatttcacgatcgacatagcccgaaaaatccttttctgaaactggctttaatcgggaaaattcattatcatacacccatacatccagcaaaccgttatcatcaaactgatcagccactgccaaaatccgctccaccacattttgaaccgtcccgtttttgtagagcggtctcatcgatcccgtaatatcaagaaccagtccaacacgagccgtcaccttcgttaactgctttttctccagtacgatctttacacttttcttttgcaggtcaattgttgccattctgtcatctccgtcagctcttttttctttgattatctcacaggaatattttgcattgcatcttttcaaagaaaaacaccgttcaatttgaacggtgtcctgtctctaaaatgtgttatatacattttcacacgtctccgccgtcggctgataaaagcagtgtgacttaaatctggccacaaacggctggttataccactgggctggacagtccccctgcggcctgaagtaccataaactaaattttgcaggccagcgcctttcaccattaatcgaccggcgtgcaagggcacgctcgctatctcgcgccctttgataaaaatatccatgagtcacagcctcaaacgcgtgtggctgataaatcatctgcctgatggtgcggaggcctttaaaatctgagcaattcgcccgcagccgattaattccaacgttgccgacaagcagcatcccctgcttgccttcgccttccgcttccgctctgagcagccttgccatcaaatcgacatccgcactcgttgctctcacgaccgccatcacgtcacctccccttgatctcttttcatcatatttcattacttcagaagtgatgacggagggacaggagaagtttttaaatttattcatctaaaaacagcaaacataatgggctgttgggcatcaaagcagcgtccggtgcagtacaagcttcacgtttccgctgtcgaagcgccgcagcctcaattcctggattcacatcattgacctctccccagcagatttgcacccgcctccgaaaagaaataaggtttaactttttacatttgaggaattatacataacaaatcaaatgacaaaaggaggaattgtaatgacacatgtgaaagcgctcgctattaaaggtattatgacgattattgtgttgtatctggtgcttggtctgggctttggtttcacgtttggtgatacgctgctaatgacgattgtgttaggggttatttcttatttgctgggcgatctttatgtattgccgaaatggaataatatgattgcaactttggctgattttggtttggcctttctcgtgatctggctgatgggcatgccgctttctatggggatgactggcggtgaagttgcattggcggctttattcggcgcgatcgtcatggcaatcggtgaatattgcttccatttctatatgatgagcaaagagattggcaagaagcattatcttgaaacaagaacagactcataatggaaaggccggtgctgacagcatcggccttttatacatattgggcgcctttgtttacgcatcctgcttgtccgcattcctgatcgccatgtaggaaaagaacaaaccgaatgccgctaacgataacgggatatacacaacagatgaaatcgagaagcccggacttgttgagctgatgagcatcacaattactacagatgaaatgatggtcgccggaaccgagtgtctacgcatcccaaaaaagatgggaactaaactggttccagcggcgccaaaagcgaaaaccgccattttgaccgcctgttgagaaatgatctcggaagtaagctctcccggtatgaaatggcagatcgagttcagccaaaagaaaccggcggctatgagtatatttgaaagtaaaatcgtgataaacgtcagtccgcccgcgatcatgagcttagcggtgagcagctttttacggctgatcgggtacgtgaacatcacaagaatggttttgtttttatattccgaaatcaccaattttacgatcagcacagcgccaaatacgataaataccgctctgacgaaggtgccgatgatgaggaatgcttcatccgtactttggaacgaaaccccgccatcggctttttcggaataactgatcagccacataaaacccataatgatcacgttggcaatgagggcacctctgatataccagcccattttcatttttcttaattcgattctgatcaaattcatcaacgtgtctctcctcctttacgcactgatgctattgccgttgatcaatttgataaaataatcctccagcgacgtatactttttgttcattgattcaatgtctacatcatttaaaatcaatgctttggatatggcagcctgagaggcttcagcctcgtaaattcgaatcgttttctcatttaatattttaaagttggttaattgcagctctttctccagcacaaagcaggcccttgtctgattcggcgtgacaagctcgatgtattcagtgttctggcccctgacatcctccattgatacctcttcaagcagcctgccgtcccgaatgacgccgattgtgtccgcgatttgttcgatttcacccagcaggtggcttgagatcagcagcgtcatcccgtactctttgctcagcacttgaaacaattgcctgatctttttaatgccgagagggtcaagaccattcaccggctcatccagaataagcaggtccggcttcgtgaggatggcacgcgcaattccaaggcgctgcttcatcccgagggaaaaggttttgacgggttttttgtcgatttgttttaaattcaccatatccagcacttcttgtatggcttttttattgtggtatcccatatattcacaatgcagatctaaattttcttcagctgtcaggttttcataaaaaatcggatattcaatcatgctgccgatgttccccagcacctcatatgacgtgtgggtgaacttgttcccaaggatgatgatttcaccgcttgtcggtttgacaaggctcgtcagcattttcataatggttgttttccccgcgccgttcgggccgagaaagccatagatttcaccttttttaatatgcatgctgacattggatacgacctctttgccctgatatgttttggtcagcccgtttgtttgtacgatataagtcaactttgtttctccttccctctcttttcctgttttctattgtagcggcgagccctgtcatttttatttctcaaaccttaagaaattcttacgattaatatgtcatgcgtttcaatgtgatcgtaaatgcagtccgttcgtacggcttgctttggacggatatgatgcctcccattttttctgtaagccgttttgtgatggttaaacccaagccgcttccttgaaatgctttatttctggattcttccagtgtgtacagcctctcaaacacccgctgctgatcggtttcactaatcccttttccgcgatcccatacggtgatggcgatgttcctctcatcataagacagcgtcagcccgattaacttgccggccgcgccatattgaatcgcattggacaataggttttgcaggattctgtccagagcctcttcattcgcctgcgcatacaccggcgtatcggggatatcgatggctgcttgaaagccttttgactgaacagcgtcataatagtgcaggatatttcgtttgcatatgtcgttcatatgtactttggtgatcgggatctctttatcttcagattctaatttcgctaaatcaaaaaaggaattgatcatctgaataagttcatttgttttctggcggagcttccccagcaatctttcccgctcttcgtccggcatgttcgggtcactttgaatggcttcaatataaccgagaatgaccgttaacggcgttttcaggtcgtgcgacatattggtcagcatccgcttcatggattgctctgttttggcaaattgggcgctgatctgctgacgattctcaacgataagattgatgttaacaagcaagtctttgagcgcatgatcgtctgtaggaagcaaaatttgtcctgccgaatcccggctgagcatgtagctaagctggtcagccgtgtaagccagattcccgtcccgcttctttttcattatgaattgaatcacattcagacacgccagagcgatgacagcggccacccatagcactgtcattctaaaactctcctaatttataaccgatgccccataacgttttaatatattgaggggaggaggggtcatcctcaatcttttctctgagccgccgcatatgtacgttaatgatgttctgatcatcaaagtactcttcattccaaacggaacggtagatttgttctttcgtaaacacttttttaggatttgatgcaaataagcacagcagctgccattctgttgacgtcagctggagcggctctccgtttttcaaaacggaaacattgtctatatctatcgcaagctggtgaatccggatcaccttattcacagccggctcctctgccgaatattgcgtcgcccgccgtatcgcggcttttactcgggctgtcagctcaatcatcgaaaacggtttggcgatataatcatccgccccaaagcccagtcccaatgccttgtccacatctccatcttttgccgaaatcattaagaccggtatattgcttttttcccggatgattttcagaaaatccatgccgttcagcttcgggagcatgatatcaaggaggaccaaatcgtatgaaccctgctgaaacagccggatgccctcttctccgtcgaaagcatgcacaattccaaagccttcttttgttaaataatgatccaccatttcactgattgagtggtcgtcttctacaagcaatatgcgctgcatctcctcacctaacctttacaaaatcaaaaaacacacacgtaattacacttattgtaattgaaaaacgtgtgtgttttataaaaattattctttttttcctgttttcagcttcctgtattccatgcccgtaatgacaaaaaatacgccaccgcatccaatgacttgaatgagcccgagccgttcaccgagaaataaagctccatagaaaatcgtcaggataggccctgccattgaaatggcggcggctcgctgtgccccgattcgttttatgccctcaagcattagcacaaatggaatcactgtggtaacgactgcaattactgcgaacaaaccatacatagaaagcggatatgctgccattggcgtattcatgccagccgccgattttatccctgtgtaaagcatcatggcagctccagcagctgtcatcccgtatgcattgagacggatccctccgatttgatggacgagatgcccggaaaggacaagataaccagcatagacggccgaagataacaaaatgaatacagctccaatcatattcgcctggaaaagctcagcattccagccgcccagcgccaagaaaagcccaaacatgaccgccagaactgcgaaaaggtcctgaattgaggacattttccggtcacgacacgcggtgaatccaaacacaaacaacggatagctcatcagcaatatacgttcaaccattgcggatacatggttcagcccgataaaatcaagcaagggagacagaaaaaaacaaaacactcccgcgccacaagccttccataggtctccttttttcttaccgtctggcattggaggacggtatattaaaaaaatcagccaaaacagcggaacagccagcagctgcctgtatagcagcacggcatctggctcagcacccatttggtatgcccattttatccaaatcgatttagacgcaaaacaaactgttccgatcagcaaaaaaatcgtacctgctgcggcctcacgaatcttactctgctcttctgctctcatctcagctcagcttttctcctttacttattcaaatgcttttggataaaatcgagaagcgtatatccttgagcagtcagaataacaccttttccgctgcaggccgggcaaggtgttccttcgatttctcccgctctttcacatttaggacatgcgacctcaagatcatcagttgcaatgaccatttgatatcctcctttctaactcatctgctatgccaccaccagccatcgtacattggccgtcacctcctttaagaaacacaaaaaacccccgtcctatgcaaaggacgagggtctcgcggtaccacctttattaacagctatacagccgttcactctaagtacagaaaacctatgtttcgatactcctctcttggtaacggggagagaaacccggcatcgcctactatccgttcagcaaagcaattcagaagcccattcggcatcaggggaggatcggttcacacctgccaccgactctctgaacctccattctgatgcgtacttgctcttcctcacgattgttaatccgttctattatttgtagagtttataatactcggttcatgaaacgaagtcaattcttaatccgatgttacaccaagtgcttccagcgccatattgatgtgttcctcctgctgtgtttgcagagctagcttggcgatttccaccggatacgccgcctgcatctctgagatgtgttcctgcatttttgcccatattcggccgcctgcttgatcatagtattcaagcaaacgggcagtttctttttctccgaaaatggtttgataaagaacaaaatccttggctgggtcagcaaccttcgcttctgtccaatccagaagtcctgtgacacgtccattttgatcgataaggatatgcggcgggtggagatcgccgtgtatcaaagaagagaaacccggccagtatgcatcatcatctacccacttttgccatctttcccaaagcgtcgtagatacgccaagcttattcttcacatcaaccatagagtctgctgtcatttgcctgaaatcttctggccttatcacttctattccggattgcccagcagatatttgatccgtgccatgtaattcagccagtatgtcggcaagtgtgcggacaaagtcgtctgacggcggctgatgatccatattccatacatattgcttttgttccaagtcaattccagcagccggcgttccttttaacatggggtaagcgatcaattccggtgtatgaattctccaatccggcacatcagcagtcagattcgcgcggagaaaggcaagcgttatgccttctgcagatgctctttccacaacatcacttcgccgcggttttcgcagcacccatggcatacctgtgtcgtccttggcaaatacaacttgaaagtccattccggtttcattcaattgcgcgttctcagaatgaaccgtcaaaccttggctgcgtgcaagcccgacaatctcagtgataagctgtttttcgttaaggtttgtcatcccatttcccctttctcatgctccggcctgcagtagagagaagggatgcttgaaggcacaaaaaagggcaggcacgccaccctcttttttgataaccatataagggctcatacataggcggattcatcccgattctctcgcattcaggcgagagttgttcactattgaattcgtgtcactcggaatctaatgaatgccatgctgtaacccctccgtttcctatacgctgattttcattttacagcatattccatctttccgctataaaaacatgaatcaagtcactggagcaggattaaacaagcacaaatcattatgaagaccccaacggtctgcccacgtttgtttgcggccgcttgccacatccaaaatcgtcctgaagatttcccagcctacgtcttcgatactggcctctcctgtcgcgattcggccggcattgatatcgattaaatcagcccaatgctctgataaggaatgccgcgtcgatactttcagaaccggcgcagcagccaggccatatggtgttcctctccctgtcgtaaacacctgcaaattcatgcccgcagccagctgcagggtgccgcacacaaaatcgcttgccggtgtcgccgcgaacagcaggcctttttgctttgctctttcaccagggccgagcacgccggagatggggcttgtgcctgatttcgctaccgaacctaacgctttttccaccacattggataatccgccttttttattgcctggtgacgggtttgcgctacggtctgcgtctccccgccgaagatagctgtcataccacttcatctctttgatcagcgattgtccgacctcttcactgacagcccgcggcgttaataaatgaatggcatcccgcacctctgtcacttcagaaaacaaaaccgttgcacctgcgcgaaccaataaatcagccgcataccccacggcagggttcgccgtcacgccggaaaacgcatcactgccgccgcattgcaggccgataaccagatccgaaacagggcatgacacccgggttctgctgttcagcctgattaaccgttcctccgccatttccaaaatggattggatcatcgccgcaaaacctcggtgatcctggagcgatagaatgtcatcatcattttcggaggcaattctttccgggaggagcttttcacatcccaatccgattaccattacttcaccgccgaagttcggatgcttcgcaagattttgaatcgtgcggatcggaatgacagcgtcgggcgcattgatcgccacgccgcatccgtattgatgatgcagcggcacaacgtcatcgacatttgggtatttcggcagcagctcttcttttattcgtttgactgcataatccaaaacgccaacaacacattgaacacttgtcgtgatgccgaggatattttttgtccccgcactgccatccgcatttcggtatccttcaaatgtatatccttcaagtgggggccgcggctgcggcaccctgtttgcgagaggaagatcgtctaacgccggaggagcgggcattctcacgagggcttcccgtatccagctcccgcgtttgatcgtctcatcagcaaatccgatcacctctccgtaacgcacgatctcgtccccttgattgagatcggtgagggccaccttatggccttgaggaacatcctcttcaagtacgagcccgcatgagaaaacagtgccctttggcagccctccatcatttacaataatcgcggtgttatctatttcatgcactttgatgtaaaggggggcttggttcttcctgaggttcatcgccatatgaaaatcactcctcatattttagtaagcgttttctaaattggtttaaaaaaaccgcagctcttacgtttcaactgcggttgctcaccattatttttcatccattccttttagaattttgtcacggacaaatttcagatgctcatacatgtggtaatgtgctttgtacggatctcttttggcaagggcgtcgtagatttttttgtgatattcgaccgttacatctctctccctgtacggaatttggctgtcaattttcgcatgggtgatcagcagggactgaatcatcccttcaacgacggggttattggcgcttaacgcaataattcgatggaactctttatccgcttcaccataatgattgtcagtgctgttggcaatatcgtcgatcgtcttctgcaaacgctgaagctcttcctcattgattttttccgcggcaattgtcacgagcccgagttctagcgccatccgcgcttcaatgatagccggaagattatcagtggccaaagcaagcatgacggaaaatggctgcatgccgattttatcgttgaaatatgtgccccctcgtgtttttctcgtaatgacgcccagcgtttcaagtgaactgagtgcttcccgtagcaccggcctgctgacatgcaaaatgtccatcagttccatttctgtcggcaatttgtctccggccctcaactgtccgctcgataataaatggacaatccgttcgatgacctgcttggctaatgttttccgattgactgtatcgactttcaaatcctctaaaccttcgtacacgaacaactctcccttcagttgttcaattgtaagacaaaatagcggatatgacaatatttacaatcaaacttatcgcacaagacacgggcgcttccggtcaaattcccagttgctgatcaggaactgcattgggatcgcatcattccgtgcgcctaaattcattttccgatagatctcatgcgctttttccacttgttccatatcaatatcgacgcctagtccaggcttatccggcaccttgacacagccagaagaaatctcaaaaggctgtttcgttaatcgctgcccgtcctgccagatccaatgggtatcaatcgccgtgatccgccccggagccgctgctgccacatgggtaaacatcgcaagggaaatatcaaagtggttgttggagtgcgagccccatgtcaaaccccaatcatggcacatttgcgcaacccgcaccgacccttgcatcgtccaaaaatgcggatcagccagcggtatatcgaccgcgtggagctgaatcgcgtgacccatttcccgccagtcagtcgcaatcatatttgtcgcagtcggaagccctgtcgcgcggcggaattcagccattacttcacgagcggagtagccattctcatccccgcatggatcttccgcatacgcgagcacatcttgctttcctttgcataatgcaatagcttcctctaatgaccatgccccgttcggatcaagagtgatccttgcctctggaaaacgtttcgataatgcggtaacagcttcgatttcctcttctccccgcagcaccccgcctttcaatttgaaatcctgaaagccatagcgctcctgtgcggattcggcaagacgcacaatggcctccggcgtcagcgcttcctcatggcgcagacggaaccacgcacaatctgactgctcatcgctttgatacggcaaggtcgtccgatttcggtcgccgatgtaaaagaggtaaccgagcatttttacttcatcacgctgcttcccttcgcccagcaaagccgcgaccggttcctgaagaaactttccaagcaaatccaacaaagccgcttccagtgcggtgacggcgtgcacagtggtgcgcaaatcaaacgtctggtttcctcgccctcccctgtcctgatcgccaaactgctttctgaccgtttgcaatatcgcctggtacgcaccgatagattttccgacaacaagcggctctgacagctccagtgtgcggcgaatatgctctccgccaggcacctcgccgactccctgatttccgctgctgtctgttaagattacgatattccgggtaaaaaacgggctgtgtgctccgcttagattcagcagcatgctgtcatgtcccgcaacaggaatcaccttcatttcagaaattgagggaatattcgatcttttttctttttgaacctgctcttgtatcggtgaactcatgcattttcctccctttataaagcgctttcataaatattagacaggcaacgattgatcggggtcttgttcttgtttctttaacacgacccgtttgatcggcccgaccagcagcaaatagctgaggatcgccgcaatcgcgttagcgccgacaaacacaagcgcgccattgaaagatccagtggcattgacaatgtatccgataataatcggtgttgtaattgaggcaatattcccgaaagtgttgaacaaaccgccgcttaatcctgcacattctttcggagacgtgtccgacacgacagcccaacccaatgcgccgaagccttttccgaaaaacgcgagcgacataatgacaacgacgagccatgctgaatctgtgtagttacagacaatcatactgcaagacagcagcatgccggcaatgattggcacttttcttgcaaaggtcagtgaacggccttttttgagtaagatgtctgacacaatgcccccaagcacgccgccggcaaatccgcacagcgccggcagggaagcgacaaacccagcttcaagaatagacatgccgcgggcctgaaccaaatataccggaaaccatgtgagaaagaaataggtgagagtcgtaatacagtattgcgcgatgtacacgccaatcagcatgcggttcgttaacagctgtttgatatacggccatttcgattctgtttcttgtttgcttttactgtcatccatggaaatcagcccgccgccctgttcgatgtacgcaagctcagcttcattaaccttcggatgttttttcggttcatacaccgtttttagccagatgacagccagaagaatgcctgcaatacccatgacaacgaaaacggaatgccagccgaaagagtgggtaagccagcccattaaaggagaaaaaatgacgattgcgaagtattgtgctgaattaaaaaaggctgaagctgtcccgcgctcggagcttggaaaccatgaggcaacaactctgccgtttccgggaaatgaaggcgcttctgataaaccaaccagaaaacgcagtgcaaacagcaggataatcgctgtgccggcggagaaaaagccaatcgccccttgcagcaacgtaaaaaacgaccagaaaaagatgcttaacgcaatgatagtctttgaaccaaaacggtccagcagccagccgcccggaagctgtccgatgacataggcccagccaaaggcagaaaagacatatcccatggcgaccgagtccaatcccaaatcgtgctggacggaatctccggtgatggaaagcgtcgctcgatccgcgtagttaatagaggtcacaagaaacagcataaacacgatgaaccagcgcacggacgtttttttgcccgccggagtaacactcgcaaagtcttttttcatagtatcttctccttttcaaagtagagaatcatatgctggttgtgataaaccgggaaagagacgcacgcctctttccagcaccattacggcttcacaaaaacagttttgatcgctgtgaaaaagtccttcgctgcctcaccctgttctcgggagtgggagctcgactgcttcatgccgccaaaaggcgcctgcagctcaacacctgcgctttctgcattgatccgaaccagcccggcatcgatttcatcaatgaaagaaagcattcggccgatgttttccgtgaagatggatgcacttaaaccgaacttcacatcattggcgatgttcagcgcctcctctatcgagtccaccttgatcaaggcgatcaccggaccgaaaatttcctcctgggcaattgtcatctcagatgtcacattgtcaaagatggcaggctgaacataatagccgttttgatactttccgttctccagcttttctcctcctattaaaagggaagcgccctcctgtttgcctttctcaatgtatgacaggcagttatcaagctgattcttgctggctatcggtcccatccagacatcctcttttaagctgtctccgattgtaatatcttttgtgcgctggagcagtttttctttaaagcgctcgtaaattccgctttgtacgatgacacggcttgtcgcggtgcatttctggccggttgaacggaaggcccccgttatgacagcttctgccgcagcttcaaggtcagcgtcatcagctacgatgacagggtttttgccgcccatctcaagctgatatttggctcccctcgctaaagcggcttgcccgatgatttttccgacttgatttgaaccggtaaacgtaacggcgtttacaccgtcatgctcagcaagcccctgcccgacaacagaacccgggcctgtcaccaaattgatgacccctgccgggagccccgcttcctcaaagcaggcaatgatcttcgcgcatgtcacagctgtttctgtcgccggtttgatgacaacggtattgccgtataccaatgccggcgccattttccaaatcggaatcgccactgggaagttccacggagaaatcacaccgaccacaccgagcggaacacgggtggtaaacatgagcgcgtctttgtcagtagacggaatgacgtcacccgtttttcgcatgccctctccggcgtaatagcgcagaatggcaatcccccgggctgtttctcccttcgcttccggcaatgttttacccatttcacgcgttgcacaggcggcgatttcctccaagcgctgctccatgatatccgctgttttgtataagtattggccgcgctcggcacccgtcagctttctccaagccgttttggcttcattggcggcggtgacggcacgttccacatcttcagccgttgaattctgtacatatccgacaatatcattcacatcggcagggttttcgactttgaccatatcgcctgattgagacttaacccactctccgttaataaagttgaggtacgtgttttgttccgtgatcacagacatgcccattgcccctttcgtgttttttctggtcaaaccgtcgcggcttttttcggaaaacggtcagccgcctgcttcaaaattgcttccaattgctgataatgatctttttcaaccgggccgacaggcggtctggctgtattccttacattcaaacccatgatttccataccggctttaatcaaggatacggcgtagccttttcgttgtttgcgaatgtcgttgatcggcagaatcacatgccgatagagttccttcacaagctcgtcatttccgtttttcaatgcatcatagaacattcgcgaaatatgcgggatataatttgaaatcgctgaagagtaagagtggaacccgatcggcagataagccggcatcgtcacttcagccatcggcattccgttgagccatcccaagcggtcgccgatcgtatagacgagattgatattcaaatccatatttcctaccccgtctttgacaccgacaagctgttcacattcggtcagacgtttgatctgttcaacagagagaactgcgttatcgcgctgataaagaatcgcgttcaagtcagtgctttcaataatcgttttcgcatactggtacagcccctcctgttcgccatgcaccaaatacggaggcagaatcaagtagccgtcggcgccttttttctccgacagctgcgcccaatcaagcgctgtgctgaggttgccgcccacccccgtgtagaccggcacctttcctccggctgccgagactgcgacttccaccatttgctcatattccttctggctgagagattggaattcaccagacccgcaagcgataaatatcgcttccaagccctcattcagcaaaaactcaatgttttgaaaaagagcttcttcctccagttttccttgtgtgttaaaaggagcaaccggaaaacctaaaattccagcgggtgcttttctgatacggctcatcaacataacctcctgttatttgtgtatacggcctctatctgtaagcgcttttattaatttttctttcacatccgctccttcccatatatccttttgtttaattgtaagacaaataaacaataagtcaatatctttattttctgatattttataaaaaagcggtaaatcactgtccggccgggattctgcgcagcaaaaaaacagcctggtcagccggctgtttggtttatatccttctttgtttcatcgtctcatgcaaaagctttgcttccaaaaaaaacacgtggatgaattttttcatatttattctagcaggtgcaaggggttttgcatccttggattggagttctttcattttctggctgacaaccggaaaatcaaagaatttcgatgcataggtttcaaattttggattcgaaaaatcagttgtgcccagtgaagcaaaatggtgcagcgaatgaataatcgctctgcggatacgctgctccgaggctttcatttcgcgattgacttccgtctgtgaggctcctgtccccagcttccgtaccgctacttgggtgaatatttgttttagcgaagggctttgtttttcgtgcggctcggattgctcgtgttctgctaaatactgcaggaccgccatgagatcatgtgcgccgccttctcccatcatgcccagctcggacaacaggaatgttcctgcctcttttaaaccgctgtcactcttctgctggggacgcgctttccgttcagtccgattgacaagccggcttagagaatgctgaatggctccaatcgagtgttcaagctcgatccgctccttcaccttttggagaaccgtgacaatttcaatgcggttaatcggcttatggataaaatattcgatgccgagcgagtacgcttccccgaccatttccttcgcctccacttgagagatcattacgattttgccggagtacgtattctggatctgacgaatcgtctcaatgccgtctcttccgggcattaacagatcgattaataaaatatcaatctgcttaaattgcagcatatgcccttccacttggcttccgtcgtctgcttcaccagcagcttccccgagatcttcgtcctcaatgatctgccttaaaattgaccgcaccgcacggtcatcatctgcaataaaaaaacgcatagcttttggttcaccctttctgaatcaaatgccggacaggcagcctgatggcaaacaccactccccgctgctgattatcaaacgtgatatccccttctagctctgtcacgatttcctttacgtaggaaagtccgatacccgtagaaggcgtgccaaattcgtcatattttgaagtaaagcccgggtcaaacacaatgtctccgattttctcggaaatcccggggccattgtcttccacctggaattctaccatactctcatttggcttacggagcctcaggctgaccattccctcttcatccatagcctctaccgcatttgctgttagattattaatgatcgaaagcacgataaatacgtgatattcgtcatgctctccctcgatcgagcagtaaaaatcaatctgcttccctagtgcttcagcgtacttttcattcattcgaatcacgagctgcagcaaatcagaagccctcatataatctctcaaactctcattcgaaatcagttttgaaagccctgcgaatatccgctggttgtcctttttcacttcatgaatctctccggccagtctcaggattctgccgctcagctgaacatccttgcccttcatttcccgatagagctgatacgaatcgtttgtcactttctctgtcgttttcaatgtcttttttaggtgcaccgtttcttcatataaattggaaacgatcatcagcatgtgctcgtgctgctgccttgtctgtttttctctcgattgtgtttcatacagcttcagcacactataaaagctcatcacaataaatgtgtgagaaatcgcaatcaccgcaatgtcagtgattttctcaggcgtgacaaccgtatgaaaaatgagaaattgcacagttagctcgacacaatctgacacaacttcaatcataaacccaatgaaaccgagcataatcggccgttcacggaaacgattggcctttaatatggaaaacagacaggcgtaagtcatataaaagaaaaagccagacgcttgatcatacagaatcggagtcagcccattgtgtcctccgccccataattccagaaagacgcgaaagatgaaaacagccgctccagtcagaaaacccggcagcacagcgggcacatgccgcaacaatgataaaaagaagaaaaaaaccggtgccccaaagctgacccggaattcttcattgaggggataaaatttcagttcaccggccagcggcaccgtaatcagcatgagggccagtatatatccgtctttttcaataaaccgttccagttttatgttgatcacatcctcgctttttattttggggaatcgggagaaaacctgcaaattgcttttgacccagaacatgaggtttttataaatcttactgcttattttcaaaatgtttttgtcgtattttgtatgattctgtagtctccattatacagtaattataccttccgctattatgaaagcgtttaacgcccccttagccttcgttttgatacacctcagtcctttaagaaaaaaatcagtgaggaggaattcgatgaaagaattgataaaagagcaccagaaagacataaacccggcgttacagcttcatgattgggttgaatactatcgcccttttgccgccaatggacaaagcgcaaactatatccccgctttaggaaaagtcaatgattcacagctcggcatctgtgtattggagcctgatggaacgatgatacacgccggcgactggaacgtctcttttaccatgcaaagcatttcaaaagtgattagctttattgccgcctgcatgagccgcggcattccctatgtgcttgaccgcgtagatgtcgagccgacaggtgacgcctttaattcaatcattcggctcgaaatcaacaagccgggaaagcccttcaatcccatgatcaacgcgggtgccctcaccatcgcttcgatccttcccggagaatctgcatacgaaaagctcgagtttctttactcggtgatggaaactttgataggaaaacggccaagaattcatgaagaagtattccgttctgaatgggaaaccgcccaccgcaacagagcgctggcctactatttaaaagaaacaaactttttagaagctgaagtagaagaaacacttgaggtgtacttgaagcaatgcgctatggagagcactacagaagatattgcgttgatcggcctgatccttgctcatgacgggtatcatccgattcgacacgagcaggtgattccaaaagatgtggcaaaattggccaaggcattaatgctgacgtgcggcatgtacaacgcttcaggcaaatatgcggcgtttgtcggcgtgccggccaaaagcggcgtctccggcggcatcatggcgctggtgcctccaagcgccagaagagaacagccttttcaatccggatgcggcatcggcatttacgggcctgccattgatgaatacggcaacagcctcactggcggtatgctgctgaagcatatggcgcaggaatgggagctcagcattttttaaacatgaaaaaagaggtgattctatgcagcaaatcctagaacatatcgtcggtattgcaaatgatcttttgtggtcaaagctattaattgttttgctcctttcttttggaatctattttacgttcaggcttaagtttttacaggttcgcatgctgaaagaaatggtcagggtattaagagaaggtgctgcttcccggtcaaaaaacagcatttctccgtttcaagccttttgcatcagcatggcggcccgtgtcggaacgggaaatattacgggcattgctatcgccattgcactcggcgggcccggtgcaatcttctggatgtggattatcgccattatcggatcagcatccagctttgtggaaagcacactggctcagatttataaagtaaaagatgtaaacggcttccgcggcgggccggcgtattacatggaaaaagggctgaacaaaaggtggatgggcgcgctgttcgctgtgttaatcaccttatcgttcggtatcgtcttcaactcggttcaatccaatacagtcagccttgcctttgaaaacgcgtttggcacaaaccgcctgacattgggactcattttaattgctgtattcggcacgattatttttggcggagtcaagcgcattgcaaagctggctgaatccattgtcgtcgtattggctgtcctgtatatcggagttgcgtttttcgtcattttctccaacattacgcagctgccaggtgtgcttgcgctaatcgtgaaaaatgcgtttggttttgaccaggccgccggcggggctttgggcgcggcactcatgcaaggcgtcagacggggaatcttttcaaacgaagcgggaatgggaagcgcaccaaatgccgctgccaccgccacaacaagccatcccgtcaaacaggggctgatccaagcttttggtgtactgacagatacactggtcatttgtacaagcaccgcttttatcattctgttttcggatgcctatcatactccgggtctgagcggaatcgccttgacacaagcctccctcagctcccatgtcggatcatgggcatcaggctttctcgcgattctgattttgttattcggattctgtgctctaattggaaactattattatggcgaaaccaatatcggctttttgaacaaaagcaaaaaactgatttttgtctaccgtatcggcgtgctggcaatgatcgtgtttggctgtgttgccaaagtccagctcgtctgggatcttgctgatttgttcatgggtttgatggtcatcgtgaatttaatcgcgattttcttactatcaaaggtcgtttttacggcgctgaaagactatacacgccagaaaaaagcaggcaaggatccggtcttttataaagatgtgctcaaaaaccataatggcattgagtgctggccggtttcagacacaaagactgacacgcacaacaaacaaatatcataagaaaagggtgttcagacatatgggctgaacacctttctctttttgcgtttattgacaaacacgtaagcctccattacgattttcatatctttttcaaaaaaatctgaaagaaggcatcggtacattctatgaatcctatccaacacatattagatacatacccgcttattgtgctagacggcgccatggcgaccgagcttgaacgcaagggctgtaatttgaatgacagtctgtggtcggcaaaaatcctgatggaagagccggagctgattaaacaagttcatactgattattttgcggcaggcgccgattgtgcaatcaccgccagctatcagtctacatttgaaggctttgccgcacgcgggctgagcgaagcggaagcacgccggctcatcgagttgtccgtcagcatcgcagctgaagcacgtgatgaattttggtcgcttgaagagaaccgtttgaatcggccaaaaccgatcattgcggcttctataggcccttatggcgcttatcttgcagacgggtctgagtatcgcggcaactacgcaatatcagaagatgaactgattgaatttcatcgcccccggatgaaggcgctgattgaagccggagctgatgtattggcatgcgaaacgattccgtgtctgactgaagccaaagcgattgttcggctgttgaaggaatttcctgaaacgtatgcatggatcagcttcagtgctaaagacggcttgcatatcagtgacggaacacctgcagctgactgcgcatcgtggcttgatgaacaccgccaaattgcagcactcggcatcaactgcacgccgcttcagcatatcccttccttgatagaggagttaaaaaagaacacgtcaaaaccgatcattgtctacccgaattcaggtgagcaatatgatccggaaacaaaaacgtggaacggcgcagcatgcgcagaatcttacggggcgagcgcccgcacctggcatgaaaaaggagcgaggctgattggcggctgctgccggacaaaacccgaaaatattcaagaaattgcggcttgggcccgctctttaaaaacaacttgacttatcggaatagtttgtatattctaacttaaagccggttcgccggagtctcgtgtcactttctgacatgagattttttattaggaaggaaataaatcgctgatagaaagttggaaaaagatgaactctgcccacaacaagaatgagacaacctttcagagaagtatgaaaagccggcacctctttatgctttccttgggaggtgtcatcggaaccgggctgtttttaagctcaggttataccattcagcaagcaggcccggccggaacgatactcgcctacttagtcggggccggcatcgtctatctggtcatgctatgcctcggtgagctgtcagtcgccatgcctgtgaccggcgcctttcacacctatgcagccaaatacatagggccgggcaccggatttacggtcgcttggctgtattggctgacatggaccgtggcattgggatcagaattcacagcagccggcctgttaatgcagcgctggttcccccatacatcggtttggatgtggagtgccgtctttgcgctgttcatcttcttgcttaacgcattttcggtcaagtttttcgctgaatcagaattttggttttccagcatcaaagtattagccattgtattatttattcttttaggcggctctgccatgttcggcatcatcccgatcaaaggcggagaagccgctccgatgctgtccaacttcacggcggaaggcgggctttttcccaatggatttgtcccgattttgatgacgatgctgtccgtcaattttgccttttcgggaacggaactaatcggaatcgcagccggtgaaagcgttgatcctgacaagacgataccaaaagcgataaaaacaacggtctggcgtctctcgctcttctttgtcggaacaatttttgtgctgtcagggctgattccgattcaagatgcaggtgtcatcaaaagcccgtttgtcgctgtctttgacagagtcggtgtaccatacgcagccgatatcatgaactttgttatcctgacagcgatcctgtcagcggctaattccggactctacgcttcttcccggatgctgtggtctttatcaaaagaaaaaacgcttcatccgacatttgcaaagctgacgtcaaaaggaaccccttttaacgcgctggtgttcagcatgatcggcggcattctgtcgttgctgtccagcgtatttgcgccagacactgtatacgttgtgctcgtgtcgatttccggttttgccgtcgttgtcgtgtggatgggaatcgctgcttctcaattcatgttcagaaaacgttatatcgaagcgggaaacaaggttactgatttgaaatacagaacccctttgtatccgttcgtgccgattgctgcgttcctgttatgcctggcttccgtcgttggcattgcctttgatccgaatcaaagaatcgcactctattgcggcgttccatttatggccatttgctatgcaatatattatgtaaaaaaccgcaaaagccagccggctgctgatatgactcattcaaaataaaaagaacctgcctccgggcaggttctttttcgattttcacacttccactgtccagttaaacgggccttttaccttgccaagctgaatatctgttatcgtttcatacagctttttcgagaggtccccgatttgcccgtcgcctacaatcaccgtttttccatggatgttgagttcaccgacaggcgtaacgactgctgccgtgcctgtgccaaagacctctgtcaattctccgcgtgcagaggccgcatacacctcatcaatcgatattctctcttcacgaaccggaatgccccagcttcgaatcaattcaatcgcagacgcacgtgtaaccccgcttaaaatgcttccgcttaaagcaggtgtgacagcttccccgtttatgacgaaaaagatgttcatgctccctacttcttccacatatttcttttcgatggcgtccagccacagtacctggtcatagcccagttcattcgctttccgctgtgcctgaagactggcggcatagtttccagccgtttttgcaaacccgactcctccgttgaccgccctcacatactcatcttcgacatagattctaaccggcttcagctgatcgtcgccataataggagccgacaggcgaaagcacgatcataaatgtatagctcctggatgccttcacaccgagactcggttctgtggcaatgacaaaaggacgaatatacagtgacgttcctttttcctttggaacccaatctttctccagctcaactaattgcgtcaatgcctcaagcaccagctcttcgtctaaagggggcatgctcatgcgctcacacgatctgttcagccgtttgatattttgatccggacggaacagcagcaccctgccgtcgtctgttctgtatgcttttaatccttcaaaaacagcctggccgtaatgaaaaacagatgaagacggatcaagcgtaagcggtgcgtacggcgcaattctcggatgatgccatccaatcccctcttcgtagtccatcacaaacatataatctgtaaaatattgtccaaaccccaaggaagacgggtcgggcttttccttataatatacagttttttctcgttcaataagcttattcaatctaatcagcacacctttcacataattgtttaaatattcagtctttttaaagctgcaaaaagtatacagcctttcctttaataatacgccgcttcacacctataaatttcagaatattctttaggatcatcagctattatacaccacattcattgtcagatgaagctgaaattaaagaaaacagccagttttattctggctgtttgatttagagcgctaaacaaaggacgacaatgtggcaaatcagcaaaatatacactgcgaatacaaattgccaattgatcttccgcgcccatgcaaacaccaccatcaaaacaggcagcatcacagtccccgccagcttgttaaccgtcagatccggactgttcgcaacatcataatgaatcggcatctgcgtcggcagaaaagggtaaaatacaattgaaaggatgaatgcagcaatcactgctccccacagcacttttccattcgtaaataaaaacatagaaccaccattcccttcttaaaacacattgctttatgaatgatatgactgttctacggtgaatttcgttcggtctccccgtgtaataatttgcgcatattccaccacttcttcatttttatcataggtaagggattctgataaaaacgcaggcgctccgacattggttaataagtgtccgctgatcgtttcatccgttaaaatcggttcgatcgattccgtgcccctgctgatttcaatattgtattttgtccttaacaattcaaacagcgagccggtgcattcctcctgcgccagccccggtgccgccttccagggaatatatgaggtatgatactgcaaaggttccccctcggcgtatctgactctgacaagcttgttgacaggttcattctctttcattttcaaaagctcggcgatggaatgatcggcaggaatcaccacaagctcaagcacttttgattcagaacgaagtcctctcatttgttctgcaaagctcgtaatcttatgcggaatcggcgtttgtattttggccgccgatacaaatgtcccttttccttgaattcttttaatatatccctcaagctctagctgctgcagagccagtctcacagttgttctgctgacatcatattgttcgcaaaactcactctccgtcggcagctgatcattcgcctgatatttgcccgatttaattaactcaatgattttaaacttgataacagaatataaagctgtcatttcattctccccattctgtatgcaatccgttctttttcattgagaccataataccatttgccctcccaatatgaaagatttgtatccttcttttataacaaattttcagaaattaatattgacagtttgataagggcggtgctaaattcgtaatgacaagtatcataaattggtcataacaaatatggtgcttgtctatctctttgagggggtgtcacatgaagattctgatcgccgagcactacgaagaactctgtaagttaagcgctgccattattaaagaacaaatacaagctaagaaagatgccgttctcggcctggcaacaggaagcacaccggtcggcttgtataagcagttgatttcagactatcaggcaggcgaaattgatttttcaaaggttactacatttaatttggatgaatatgctggtctctctccatctcatccgcaaagttataaccattttatgcatgagcatctttttcagcatatcaatatgcagcctgatcatattcatatcccgcaaggagacaatccgcagcttgaggcggcatgcaaagtatacgaggatctcatccgccaggcgggaggcattgatgtccaaattctcggcatcggcgccaatggccatatcggttttaatgaaccgggatctgattttgaagaccggacacgtgttgtgaagctctcggaaagcacgatacaggcaaatgccagattcttcggcggcgatccggtgctggttccgagactcgcgatttcaatgggcattaaaaccatcatggaattcagcaaacatattgtgcttttagcaagcggcgaggaaaaagcagacgccattcaaaagatggctgaaggtcctgtcacgacagatgtaccagcctccattcttcaaaaacacaatcatgtaaccgttatcgccgattataaagcagctcaaaaattaaagagtgcatcattctcataacacaataaaaggagactgtcatgtttaaaaaggcatttcaaattctgcagcagcttggccgcgcgttgatgactccggttgccgtcctgccggcagcaggtcttttgctccgtttcggagacaaggatttactgaacatccctattataaaggatgcgggcggcgttgtattcgataaccttccgctgattttcgccgtgggggtcgcgatcggattagccggcggagaaggtgtagccggacttgccgctgtcatcggatacttaattttaaccgtcaccctcgacaatatgggaaaattactcggccttcagcctccgtatgaaggagccgagcacctgattgatatgggggttttcggaggaatcattatcgggcttctcgccgcctatttatataagcgattttcatcaatcgagctgcatccggtccttggatttttctctggaaaacgctttgtcccgatcattacttccgtcagttcattggtgatcggcgtcattttctcattcgtttggccgctgatccaaaacggaattaacgcagccagcagtttaattgccgattcaacagtcggcctgttcttttatgcaacgatctatcgtttgctgattccttttggcctgcatcatattttttatacgcctttctattttatgatgggagaatacacagacccatcaacaggcaacaccgtaaccggcgacctgacaaggtttttcgcgggagacccgacagccgggcgctttatgatgggggatttcccttacatgattttctgtctgccggccgttgctcttgccattatccataccgcgcgtccggaaaagaaaaaaatgatctccggcgtgatgatttctgcggcgctcacatctatgctgaccggaattacagaaccggttgagttttctttcttgttcgttgcgcccgtgctctatttgattaactctattcttgccggcgtcatctttgtcgtttgtgatttattccatgtccgccacggctatacgttctcaggcggaggaattgactacgtcttgaactacggactgtctacaaacggctgggttgtcattcctgtcgggatcgtgtttgctttcatttattattatttgttccgatttgcgattctgaaatggaatttgaaaacgcccggccgtgagacagatgaagacggtcagaatgaggagaaagctccagttgcaaaagaccagcttgcctttcacgtgctgcaggccttgggcggacagcaaaatatcgctaacctggatgcatgtatcacaaggcttcgtgtgaccgttcatcagccaagccaagtctgcaaggatgaattaaaacggcttggtgcagtaggtgtgctggaggtcaacaacaacttccaggcaatattcggaaccaagtccgatgccttaaaagacgacatcaaaacaatcatggccggaggcgtccctgccaccgccgccgcgctggacacggtaactgacaaaccgctgaagcccgattccgatgagacctttatttatccgattaaaggagaaacagtctctttaggggatgtgcctgatcaggtcttttcagaaaaaatgatgggcgagggatttgcgattataccatcagaaggaaaagtcgttgcacctgcggacggcgagatcgtctcgatttttccgacaaaacacgccatcggctttatgagcgccggcggcactgaaatcctgattcatgtcggcatcgataccgtcaaactgaatggggaaggctttgaagcacatgtcacaagcggacaagccgtcaaacaaggcgaactgcttctcacctttgatctcaattacatcaagcagcatgccgcttcagccataacaccggttattttcacaaatacctctgaagaagatctaaagcacattcaaatgaagtaaaaaagtcccccctgctgcgggggactttttcgccaacataatgaaagcgctgtcaaaataaaataacttgaaaaaaggtgtttgcatttgaatcacgaatgatatgaatatgcctacattctatcgttctaaagggggattcatttgaaaaaattaatcgcgtttcaaattttaatcgctttggctgtcggcgcggtgatcggccacttttttcctgatttcgggatggcactgaggcctgtcggagatggatttatccgcctgattaaaatgattgttgtgccgattgtattttctaccattgtcattggagccgcaggaagcggaagcatgaaaaaaatgggcagtctcggcatcaagacgatcatttggttcgaagtgattacaacgttggtattagggcttggacttttattagcgaatgtcttaaaaccaggtgtcgggcttgacctctcccatttggcaaaaaaagatattcatgaactttccggctacacagacaaagttgttgatttcaagcaaatgatcctggatattatccctacaaacattattgatgtcatggccagaaatgatttgcttgccgttattttcttcgccattttatttggtgtcgccgcagctggtatcggcaaagcttctgaaccagtaatgaagttttttgaatctacagctcagattatgttcaagctcacgcaaatcgtcatggtcactgctcctatcggcgtgttagccctgatggctgcttctgtaggccaatatggcattgaactcctcctccctatgtttaagctggttggcaccgtattccttggcctgttcctgatcctctttgtcctctttccgcttgtcggtctcatctttcagattaagtatttcgaagtattgaaaatgatatgggatctgtttttaattgcattttccaccacaagcactgaaaccattctccctcagctgatggatagaatggagaaatacggctgtcccaaacgagtggtatcatttgtcgttccctccggcttgtcattgaactgtgacggctccagcttatatttatcggtttcttgtatctttctcgcacaggcctttcaagtagacatgacattgtcccagcagctgctcatgatgcttgtgcttgtgatgaccagtaaaggcattgcagctgtaccctcaggatcgcttgtagttcttctggcgactgccaatgctgtaggactgccggctgaaggcgttgccattatcgcgggtgttgaccgcgtcatggacatggcgagaacaggcgtgaacgtaccgggacatgcgatcgcctgtatcgtggtatcaaaatgggaaaaggccttccgccaaaaagaatgggtttccgcaaacagccaaactgaaagcatatagaaaaaaagaacacctcaatacgaggtgttctttttttattcagcagcagcgtgatcttctgtttcaatcgctgccagtcttgcgtttacttcttcttctgtcatattatgctctttcacatacaggtttcttgggttcgtgcggcattcgtggctgcagctgcgcatatatttatactcattttccggtgtgcatatcatttttttattgcaagatggatttgcgcagttcacataacgctcacacggttctcctgtaaagtagtccttgccgacaatcacatgctcgacacggttgacaggcacgctgattctttcatcaaatacgtagcactggccgtcccaaagcttgccttgcacctctggatcttttccgtatgtcacgattccgccatcaagctgagctacatcttcaaagccttgcttcaccagccatcctgagaacttttcacagcgcacgccgcctgtacagtacgttaaaatctttttgccttcaagcatatctttgtgctcttcaatccattcaggtaattcacggaaggcttcgatgtcaggacggaccgcacctctgaaatggccaaggtcatactcgtaatcgttacgcgcgtcgatgacaattgtgtttggatcctgcatcttctcataaaattctgcaggcttcaaatgctggcctgttgtttcgttcggatcgacatcatcttcaagacgaagcgttacaagctcttttttatggcggacgaagatttttttgaaggcatggccttctgcttcatcaattttaaataccatgtccgcaaagcgaggatcagctttcattgtttccatatatttttcagtctgttcaaccgtacctgataccgtaccgttaattccttcagaagaaacaaggatacggcctaacaaaccaagctccttacaaaaagccagatgctgctctctaaacgcctctggatcttcaatcggaacatatttatagtaaagtaatactctgtattgtttttccatgttttaaacaccctgttcaattatagttagttgctatgcacactcttactatatcatacaggaaaatgccgcaaagatgaacagatccgcccagactgataaaaatatccaagctcttacaaacctaagcagcacaagggtttattaataacaaatagtattttccattaactcactaataaaagtagttgtctgaaaactatttttgtagttcctcttcaaaagataaatttaccggttcatctaaaagttctcccggcatttcaaggtttgttgaaggaacgctctcatctacctcttcaaaaacaacatgatccatccacacctgacccggcccagataattgaacgccaaaagatatcacagcgctattttctgggacatctaaaacgatagcataatgattccaattggttgttccggtaataggtctgttgctcatattatcaaattggagaacatcatcagcagcactgtcaacccgcatccaaagtgaggcaaaatgctgcaccccctttgttttgataaaacttgatagacgaagcctttttcctagatagcgatctgctttgaattgctgcatcatcgtcgcaaattcaccgatatcctgaaccatcgttgactttaaataccctgaagcttttccctgatgtacattttcccggtcaatccccatttcgaattggaacggatggctcccgctcaatacccagcctttcatttttttctccatgtaagattcctccttttttgaagtaaagcgtttcataaatgttcggtatgctcctggcggcatgtgatacatctttttgaacgtcctcgtaaatgcttcttgagattcaaactgataatacaaagcaatatcgataatacgatgatctgtataaagcaaagctgccgccgcattcgcaagacgtcttaaccgaatataagaagcaaccgacatgccgacttctttttgaaaaatccgatgaaaatggaattttgaaaagcttgaaacgttaacaatatcctcgtttgatatttgctcatgtaaatgtgattcaatccaattgattgttttctggacagctttttcataatacattgcacgctccaatctcctttctgttttagaataatggatcacggattatatgttttgattatttttgcgatatgtaaaaatcccctgtttaccacaggggacaccgctcacttgataatgacagagggcgtgatatgctccagccaaatgacaccgtcatattgttccttcaggatcatctgctcttccatgtacccccaatagagcgcagtccgcggggtatacatccacgaagtgcctttcttgttttttgtatggagaaaatcaacaaaaacagccggtcggtccgccgctttcagcaaagcttcaaggctcccagacggcggcgggcttgtaaccggcttaacagtcttattatcggagctatcaagactcgcacctgagtaagcataaatgccaatcgtatatgtttgttttttcagccgctccggcaaataatcacccatgttagggccgtttagctgtacccagtcctttatcatcttcgtattctgtttgcgtagatggtaattgtggccccagacaatgattttctttttcggataaagggtgtcggctacccactgaaattgttcagccatcatgcggtctctcataaagaatgaaaaatcctcaatattctccggatactcctctagtttttctttcatttcttccagcatatatgtttccattacgtcaattctcagctgaagagaatgcataaacatctcataagctttcggctcttttggaaggttttcttttagctctgaagcatgtgttttagtgaacttgatcagcttctgatagtttttcacaagcttttccttcttttgcgaaaattcatcaaacgtattgctgtctgtcactaatgttgaaaaatcattttctgattgggagagcaactctgctttctcagggtccaccgcttttacccattgagtcgcagctacattgaatgaattcttcatgctttgaatatcaaaaccggtaaggatcagcggatcgcctttctctttttgctctttcatgtaatcaaacaattcgacgacatcttctgtgtgccatacagcgtaaatggagtttttcatcgtgcttttaggggttaattggtccatattaaggtaggatgcatttgtatcaggaaagccggattcaaaggccaatacatcgtatcccagctcttcgtggaggtatttgatcattctgacctttgtggcattgatttcgccagcaccgtgtgtggtttctcctaactgaacgattcgttttcccttcagcaccttttttagaaatcgaaggtctttgtttgaagcattggaagcatccagaggctgtgcatgtcgttcaatccagtgatcccaatatttttcttcagaagcagcacgggctgaggctgaaaaagaagaaaacgccagacaaacgatcagcagcggcagggtcattctcactatcattcgtttcaattctatctctccttttctgctaggttctctagtcattacgagatagatatagaaaaagtttccttttcctgccaacaaaaaaaagcttctctgttgaaagaagctttagctggattctctcatcacctgatgaaagtaaaaccgatacgtattttgtaaaaatgtctcaaccggaagctgcacatccgcttggtatttgctgatgatgaatggaaaccgctcgattcctttttcgcgcaaattgttcgcttgttcatcatccattactttctcttgcaaaaccgcttcaacgatcggccagcacacttctcgcacttgccgcaggacggcttcatctccggtgttctgataatctgtaatccagctgatgatttgtttctccatgaatctcacctttcttcaaaaaaagaggcgctgcgtttatgcaagctcctctttttattcttcgtaacctatcagttctccgacttggacttcttggccttctgctaaatgggcggacggctggaacgcgtctttttcaaaaaccaaaatgacggttgagccaaatgaaaagtatcccagctcctcgccgatctccaattcagtacgggtattcgtctgcacgatagaattaatattcatcgcgccgacaggaatcatcaggacatttcggctgccgctattcagctcgtacacaaaccgataatttttcgacagcacatctttcccgtattttaagcctagttgatttaccgggtatgagcgatttccgagctcggccagcttttgatacctgcagctgatcggagaatggaaacggtgataatgcctcgggcttaaatacagcacgacgaaatatccgccgttgtattgatggtctgcgcttttacagccggtcagctcagcgaatgagtaatcttttcccttcaccgtaaaggtttgattcgggttgatgattcctaccgtctgaaccacaccgtcaacagggctgaccaccgcatgcgcctcttttgacacagggcgccgctccagatttatttgtcgaatgaacaattcggacagcgatccgtaatcagcagccgtaccgtccacatcatcccaattcagccgaaaatgttttgagaaaagcggaatgaccggtttgctgattttcgactcgcaaaatcctttaatcagataggatgacagacgatgattcgtcagctctatcaatgatcgatacagaatctttacagccgtattaaacatgaataatccctataacccttccgattgtaataaaaacaaagcaccataaaaaggcgccgattgcagcaaacgcaacatacgttttcagatccattttgccgatccccgaaaagtagcacgtcacatgtctgacgccgggaataaaataacctaaaataagagaatatggaccgtatttcttcatccatttttccactttcatcattcttttttcttttaagccgacccacttgccgtacttgtcgataaacgggcgtccggcttttctgccaatcatgtagctgatcagcatacctaacaaagccccgacaaaactaatcaatatcgaaagctcataattcaatacatcggtatgcgtgaaatagccaacaacggtcatcatcacttcatctggaatcggcaatcctacaattcctaataccagcatcaaaaaaatagcgagataaccgtaatccgctatgagctgctgaactaattccatctcccagactccaggttttctgccgcatgttttttaaaatgagggaattttattttactcaccatcaaatatgagagtccgcaagtgccgattgccagaaggatcgggttataggtgaagcttagaataacgagacacatgcccgcaaacggaatcggcataccgataaacgtcgggagcttgctttgttcaatgttaaatttagagaggcgaagcattccgcaaatgctgtacgtcaatgcgcataagatcccgataaatggcagggtatacaacgcgacactgtaagcaagcatagaaggagccaccccaaacgtaaccagatcggcaaacgaatccagttctctccccatatcagaaacggcattcagcttacgagcagccatcccgtcaaagaaatcaaggaacatgcctgtaaaaataaaaagcactgctgaatgaatgttgtgatatagcaaggaatgaatcgccagcaatccgcaaatgaagtttcctatcgtaatcatacaggggatgtaattcacagtgtaaccaaacctccaattgtaaaaccatctatattatttgacgatagtgatcgaatagcgttacaggaaaaatttttctccaataagcatgataacatagaatgctcccaaaaaaagcagcattcaaattctattattatacaacatttgttaccttttgaaaaatgaatgccaatcttttcatgttccttactattttatccccccgcataaaaaggacaagacgcgttgattgacgtactctggctgctccagagataacagatgtccggcgttctttacgatttcagcctgaattcccggcaccaataccgaagcccgctcaaaggccatttgctgatggtacatagcctcgtgctcaccgaacatcagaagtaccgggacttgtattgatttcaattcctggtctgtgaacacgtacggaaagccgttttctgtcggcttcaggctcctttgctcatcctgccattccacgcccgccacaatttgtctttgcagtaaaggatgcagatcataactgtcgcctgtgatccacttgatatatgattcagctcctcttgcccctgtaagctctgcagcgtatttatagacatccggatgaaatgaaataaacgcttcagcgggactgataacaaccgcccgctctactctttcaggcgcgcggagtaagaaattcacgatatgggacccgccaagcgaaaggccggccagatgtgccgtctcaagtccaagagaatcaaagacatctttcatccattctgcaaaatcagctctcgtttccatggctgctgatggtatacttttatttttgtctcctattatatcgaccgcatatgtacgaaattgactgctccacgctgcgatattcggataccacatcgcagagctgaaaaggcctccgtgaagcaaaatgagcgaaggtgcgtcctttggcccacttgcaatgatatgtgtttttccaaaacgagtagaaacatagaatgcttccgactcaatcggccacaaagaaaggctttgatcatatgcctggtaaaagcgcagaccactttcaaccgcggcaaactgcattgaatcttgtatcatcttcttctttttcctccgggtttgattgatataaaggataacgccccttttgtctcgtaagaaaaaatacctatttcttattatctcacataataaatttccagtatatagtttggtttcctgcaataaataaaaaaggcagttcccttaaaatcaaggaaactgctattctttgaagactaatggaatggcatgatcttttttatcctctgttaacgagatgtgatgggttactgatgtttcacccttcgtcaacgcgactgagtaatcgccttttctgccggtatcccatttgatatctccgtttttgtctgttttaccgagtatctcgccaatctctgtactcggctcctcatctgaagagggcgctttgacaatcgtcacttgaaccccttcgaccggcagccccttagcatcctccacatgaagagtgacaggaatagtcgtttctttttgagaagaatgcgtctgcgaactgcacccgcataaaaacaaaatagacatgaatatggctagtttgctgtatttattgatttgcccaatattgaatattgttgaatacatcgttcgtcacccttgttcccaagttatatgacgatcctccgttcgtgtgaatggcaatagctgtctgccctgtatcactgtagtttcgataaacaggcgagccgctttggcagccgtacgtatcggttgtataggtcagcttatacgtttcagcggagcgaatcggctttgtatcagaccacatcgtgccaaaggttttgtcacatgggaatcctgtcactgacgaggaaaggcccacgggactgctgctgtttgtagtccggtagccgtaccagccaaccgtgtttccaggagaaccgtttaatttaatagctccgtaatcatagttggtgtctttgctttccgtccatcctttgacggagtaaaacatcgtgcctgaataagtaccgtacggatatgacgaaccattgcggcccggcgcggcggttatcgtcgaagcccatccatgatcctggctgtacacacaatgtccagccgtgacgactgtatttggattgactaaaaatccggtacatccataagtgcttgaagtgttgggatacttgattgacagttgaacggttgctctatatggaaaagatgtcgtgctggagattctggtgcgttcatcagttccgataatgctcgaaggctgtaaggtttgaatgtttttttccagttccgtttggccgccgtataacgatttacttgtttttccggttccctcataaggggcggaaacctgatctgcttttgacgtttggtttttcgtagcatcagcttctttaccggtattcgatacagaagtttgcgggttctctgccgcttttgccggtacgccaaaagaaaccgctgctgccaaagccaaacacaaaaccgttaagtaagcgaaccattgttttctgaatcttggaactaatttcattttgtcatctccctcctttagtgtcaaccacccgtatcgatggaagacttttacattataatcaggtttctgattcttatgataaaacttttacggagaaagaaaaaaacaggccttgtcccatgacaagacctgttcaaactctattttaaaattagctggtccaacgctttctttgcattctctcttgccgtttcaactgaatcagcagcagaaagcgcaactgccatacgacgtccggcttttgttatcggctttccaaagacgcgcacttgagtctttgggactgccagtgcgttttccaatccttcaacagtgtaatccgctaattcttccggcgctttgaggggcctgctggcgccaggagaaagctgtgtgatttctgtaatcggaaagccgagaatcgcccggacatgcagcgcaaattctgacaaattttgcgtcaccagcgtgacaagacccgtatcatgcggacgaggagatacctcactgaaatataccctatctttcgcaaggaacagctcaacaccaaacaggccgtatccgccaagctcatccgtgatcgttttcgcaatatgcttcgcttcttctatttgctgctctgtcatatcatgcggctgccacgattcgatataatccccgtccttttgcacatgaccgatcggctcacaaaatgccgtaccgttaaccgcacgtacggttaagagtgtgatttctgattcgaaagggataaactcctcaacgatcacgcggccgtttttcacccgtccgccttccatcgccgtctcccagcagctctctaaatccgcttcagagcggcacacactttggccttttccagaagaactcatcaatggtttaacgacacaaggaaaaccgatctgagctgccgcttgtataaattcatcatatgtattcgcaaattcatagccagctgtcgcaagtccaagcgtttccgccgcaagtcgtctgatgccttcccgatccatcgtcagcttggccgcacgggcattcgggataacgtgaaatccttcctcttcaagcttcagcaattcatccgtcgcaatcgcctcaacctcaggcacaatcaaatccggattttctttctcaatgatggttctgatctgctctgggtccagcatatcaacgacataactgttatgcgcgacctgcatcgccggagcatgctcgtaactgtcaactgccaccgtctgtaccccaagacgctgggcttcaatcactacctctttacctaattcacctgaacctaacaataaaaccttctttgattgatacatctttgcccctcctatctgttccaaaccattataactgaaatatttgaaaaataaatttttattaaaaaagataaaattattattgagggttaaaatcttttaaattcttaaacgaaagcagacaaataacggtctgctttctctattcctaaacagcaacatcatacaagaaatcccccaaaatcatgctacacttaatccaagaccaccacaccgacaggaggcatcccatgcaaaacgaaacccgcacactgcagcttgacccacaccttcatatagaagcctaccgcttcaagggaattatgcagaagttcccgaaccactttcacgattattatgtgattggatttattgaaaaagggcaacggtatctggcctgtcaggatcaagaatatatcatcaatccaggtgatcttctcctctttaacccccgtgacacgcatagctgtgaacagattgacggccggacgcttgattatcggtgtatcaatgtcatgccggatatcatggagaaggcggtgaaagagattactggctccgggcatctcccttatttctcccagcatgtgttattccgccatgagctgacagccagcctgcaggaattgcatattttgatatccgaggaaaaacaagctttgcgtaaggaggagctgtttcttcatctattagaggagctgatccgccattattcagatgtcacgttccttagcagcgttccagaaccatcagacgaagtcaaaatggtttgtgaatttttagaagagcattatgccgaaaatgttacactcaatgatttgagtgaattaacaggctggagcaagtatcatttattgcgttcatttacaaaacaaaaaggcattacccctaatagctacatggaaacaatccggattaatcaagccaaaaaactccttgaacaaggggtaaggccgattgatgcggcatttcagacaggattcagcgatcagagtcatatgacgaagttttttaaacggcaggtggggctgacgccgaagcaatacatgaagatttttgaaaaggagcttcacagatgaacatacaaagagaaacttcggggcatatcgcagccattgtgaccattctgatttgggggacgacctttatttcgacaaaagttctgctggctgacttctctccaatggaaatattattttatcggtttttgatgggctttatcgctcttatcctcgtccgtcccaacatgattccgttcagaaattggcggcaggagctgttgtttgccggagctggtttatttggcgtaaccttatactttctattagaaaatatagctctcacctatacatacgcctccaatgtcggcatgatcgtgtccattataccgatgatcactgcggttttggcccattttctgctcgaaggcgaaaaattgcgtctgacttttttgattggatttatctcggcactgatcgggcttttattgattacgtttaacggcaatgtggtactgcgtctaaatccgctcggagacatcatggcagccggggctgctctcgtgtttggcggatactcgatattcatgaaaaaattaagcgcctacgaataccacatcatcgagctgacacagagagtatttttgtatggtttattgtttatggttcccgctttatttttgttcgacttccattttgacctaagccgattttcatctgcttcaaatatactcaacatgcttttcttagggattggcgcttctgccctgtgcttcgccacttggaattattcagttggagtgctcggagccgtcaaatccagtgcgtatatttacatggtcccggttatcacgatcgccgcttctgtcctgattctgcacgaaaacatgacatggatcgctcttctaggaggcgcgcttacacttttaggcctctacatttcagagctgaaaccgaaagcgaagctgttggagaacggatgtaaaatggatgcttaacggcatccatttttttattttgtcctacgtttgccacctataaatgaacgcaatctaacaaaggaggaatcgaaatggttgatgaaatggtcttaatcacacagcaatggctgaacgatacgtacagcggcaaacatgggtataacccagttgaagaaagcgggaaaactgggtgggatacgatctacggtctgactcgggcgcttcaaattgaattgggtatctcagagccagccgataacttcgggccgacaacacagcgcttatttaagcctcttaaacgccaagctccagattcaaaaccaagcaacatgaattttattttacaaggggctttatggtgtaaaggctttaatcccggcggttttacaggcgtcttttacgaaaaaacagaaaatgcggtaaaagaatttcaaaaagctgccggactgacaacacaggatgggattgtcaccacgttaattatgaaagccttattagacatgagcgcttttaagctggtgtctgggggtgattcaagaattcgccagattcaacaaaacttaaatcgagactacaatgactatatcgggttaatgccttgtgacggactgtatggccgcgatacaaataaagctcttatttatgccctgcaaaaagaagaaggcatgagcacaagtgttgccaatggatttttcggaaacggcaccacaagtttgtgccctactttaactcccggcgattcaagaacaggatttgtcttaattgttcagtacgccctctattgtaacggaaaatcgttcgatcctggtgagtttgacggcaaatatggtgtgggtgttgtttcagctgttaaagcatttcaagagttcatgtgcctgccgcaaacaggttatgcagatatgccaaccattaaagctttattatcaagctcaggagacacaactcgcaccgcttctgcttgtgacactgctacaattataaccgcagaaaaagctcaaacactgcggaataacggttataaaacggttggcagatatttgaccggaaatgtgcggacaagcagcggcctcacatctaaagccctgacatctaaagagcttgcagttattcttgatgccggattgaaggttttcccaatttatcaagacggcggctatgaatcttcttattttgtcaaagaccaaggcacaagagatgcatatagtgccgcttctgctgctagaagattaggttttccgtcaggcacgaccatttatttcgctgtcgattttgatgcatacgattatgaagtgaccgataaaatcattccttatttccaagagattaagtcagcatttacaaaaatgcagacattttcaaccgcacctaagtatgaaataggggtttacggaccaagaaacatttgtatccgtacatctgaagcaggactgacaaagtatagttttgtggcaaatatgtcaacaggatttagcggcaatctcggctatccgatgccaaacaactgggcctttgatcaattttatgaaggaaccatcggaagcggctctggaagcatcgggattgataaagacgggtattcaggaagagactcaggtgcaagcaatgtaaatccgccgtctgatccggtatatgatgcaagactgcgtacactgacagacattttatctaccattccagctttagaaaatctaacaagtctggcaaacgcgatgtttgaatttgatacgacagaaaccattttcacatcacctgagttggatattattctatcaacttcacttctggcaaccataccaagtgaaggttcaccaaacacaattaccattacaaatggtaaaccaggtgcctatatcacgggtttattgggcgacactcaaacgtctctcactgcgtcacaaatcgactcttatcaaaaccttttaaatagtctgagcttatcagtacgcaacggttatttggaggtttatgtaaatccaacagctgaatctttaaacattcaaattaaaatctatacacctgatattccagtcggtgacaatgtcacaactggactaacgactacgattacgtttaaaataaagacgtacaagggagtaccagttacgtctcccgagagtgaattagcgttagattggccgtcttatgatcaatatttattccctgttgtaggtgttgctgcacttttactaattgggaatatgggcagtgatttaacgaacaataaaggagtcaaagtcgctaccgcattatctgctatgttactggccatttttgcttattatactagctaactttaatacaaaactgcatgaacataagttaaaatatgctcatgcagtttttttagtttatctatcgtcttttggaggtttatcaaaaatgaaaaatgatcaaatagtttttgaaaaaacaaaaaacatcgctcatgatatcaatcagatgcaaaatcagcaggagataatagattatctttttcgccaagattctctgacactcaaccagttgaagcactattattcggaaccttctcttccgcttcagtttcttgtgaaagtagcagttttatgcatgtttatatctatgactttagcttctttccttttcatccaagcaaaagaagtcttcaccaatactattctttcagatatttcacctgcagtgttttctatttttacagtcatttgtatttttatgacttatactaaaatcataaaaaaaggaaataaaaacaaaggaaaagcatcccttaatcaacgatctgaattctatgagaaaaacaagttaattaatacaatactttataaaaaatataaaatggatcaacaaaacatacaggctaataaacatactgcctctgataatgaagattcaatgaattttagtgctgtattgaatcatgttcttacaattagtaaaaatgataaagagcttttgggctacttagatacaagagataatgctatgctaagccaattaaaagcatatttttcaactcgtccattttcccttccacattatatgagtttgatgttttgcggaagtattattgttgtctatgcaacttctttattttcaggacaaatcaattacattgacataccacacatttttatctttctattattaattattttcttgaaaatccttattgatttgataaagcttttaaatatatctagaaaaggacaattacatactgttctgcactttgcacagagagccgaatatttgcgaatgagaggagttatagattttattctaactgaaagatataacaaaaaaatcatgtaattttgtttcatccttactaagaaatactcaatttttatactttaagagatgtatatattgaatgtagaccaccatacatataaagaaacagaaacagcaactttattttagaacataaaaaagatgataaagaacttcttattttcctaaacaaatatgattcaatcatgctgaatcaattaaaggtattctttagtgaaccattgcttacattcaaacacacttgccaaaatcgtatgtactgtgacattaataacgttatacttctattttttcagcactcgttttaatgaattaatagaattagctgtacaaatgttttttgccttgatcggccttttttgggtttttattgtttccccattttcaagaaaagttcaaatttctgaacgcttcaaacaaaaatccgaaaacgcccgcatagtcggtatgatcgacttcgtattagaacaaaaatacaaaaaaagcatctctgaataatctcgaaatcagagatgctttccctttgtcctcatcacttgtctaccacagccgcactgtcacgcgtaaccgcagctggctccctcagcatcacattcattacgctcgcaagcacgagcattccaatcgacaaataaaaagccagtgtatactcacccgttaccgtgtagatgacgccgggcacatacgcacctagtgccgatccgatctgatgggcgagtgacagccagccaatcatgaggccgatcgagtagttttgaaagtactgggtggcgagcatttgagtcggtgctaccgttgcaaagtccactaatccaaacagaatcgcaaaggctaaaagcaagtagggctcgtggctgtaaataagaatcacgatcgacagcgcccgcaccgcatataaaatgcacaggattttccggctgctccaccggtccgctacaattccggacagcaagatcccagcaatattaaagcctgctagcagactgacagcagcactcgtgactgtcgttgaaaagccatgatcatgagaaaacggaatcaaatgggtatccatcagccccacggtcgtaaatccacagatcaaaaacggaaaaatcaagaaccagaattgcctcatacgaaacatcccggccactgaaagagctgttgttttgggtgctgtttctttttctgatgcagccagtccgcctatcggctctgtattcttttctgaaggattgttccgcagcatcagcagcgcagccggaaagacaatcacgattaacagcagtcccaacaccacaaccgtcagcttccagctaaaccaatggatcaacatgagtgagccgggaacgagaagcatttgccccgcgccaaagcctgcttccatgatcccaaaggctagtccccgctttttgctgaaccaattgacgaccaatacacttgccgccacattcgatgctccgcccactccaagcgagacacccagcccgtaaagcaaaaacagctgccaaggcgaagtcacaaggtatgttaagaaaatgctgactcctgtcagtaacgcactccatgccaaaacagcccgggcaccccatttgtccacaagccgaccgatcacaggctgtgatatgccataaacaataaaactcaccgtcgaaatcagcgagatggtgcttctatcgattgaaaactgccgttcccacggctccacaaacgcaccaaacgacagccgcaccccctgaaccgccaataagatcaaaaaggtgacggagacgatgatccacgcataatgcagtcttttcatgacagctccaaatcccaccgttcttctgtcagctgctgtccccataatggcgcttcttgttttacttcacttatcctgaatccaaattttttatagagcggacgagcctcagccatcgtgctcaccgtccaaaggaaaatgcggtcaaacttcatgtcttggcagtatgcaaccagatgctccagcaattgcgtgccaagccccctgccccgaaaatccgcatcaaccagaaaccatctgagctggactgtcttttcatcgtgcttgaccaacccgacagagccggcaaatttcccgccgctttccgcaatccatattttttcgatgtcagcgtcaaatgtctcctgaagataagctaaaaacgtgtcatcccaaccgtgagcctccgcgtaaaattgtctttgtttctcaataaggagttgaagatcctccgaaagaaaataatctctaatcgatatctctgatgctctggcagaaagcgactgtgaaaggatcgcttcaatctctgccatcgcctcggcaagcttgtgctgctccttttggttgattaccttcagcatcagttctacttgttcgttggctttctcctccagctttttataaatcgtttttcctgtttctgtgacaaaaatgtaatggtggcgggcgtcatctttgctcctctgtttataaatcaaatcttctttttcaaactgcttcacaatcctgctgacatatccccggtcaagccccagcttatcctgaagagcttttgccgtacaattaggcgtattataaatctcaaataaaatccgtgtttctgttaaggaaaacgggctgtcgtaaatgtgctcattaaggaaaccaaggacgtttgtataaaatcgattgaactttctgaattttaacccgacagatgattctcttgttttcaaatcaattcccactttctaatatcgttgactaaagcaattataatcacatatagttgctttagtcaacgatatgttagaaagtgaggtctttttaatttcctgattccttccttttccttaccacaatcaatgtgatataggataaagccagagaaaccaagctatagacaacagcccatcccaaaaatgattgattaaaaatggtaaaggtgagcacaagagaaatcaccaaactaagcattggcatcagatacgggtttttacaaatacaggtcccgacaatcgatagcagcataattcctaacggtaaaataaagaatgcgatatctaattcatccatctttaaacagcctccctccagatttttatgttactagtaaaaaaatataattgcatttagtaaaaggataatattcacttccctaaggcccaatttgaaaattacccgtttacattcgctccggactatgataatttaagaaagcgctatcatgataagttaatagcttggatggagatgaggagagccaggaatccaaccccttttgacaaggggtgttttctggctctttttgtttttcgggaaaggaggcacgccacacatccagcacaaacagcaaagggggataattattaatgcttaatatatttaaaccggctcctcatattgagagactggatgattcaaagatggatgcggcatacaaacggctcagactgcaagtattcattggtattttcattggctacgcaggctactacctgctgcggaaaaactttgcctttgccattccttatctgcaggaacagggattttcgaaaacagaactgggtttggtgctggccgctgtgtccattgcgtacggcttcagcaaattcatcatgggaatggtgtctgaccgctgtaatccgagatattttctggcgacaggcctatttttatcagcaatcgttaatattctattcgtttcaatgccttgggtgacttcgagcgtcaccatcatgtttatttttatgtttatcaacggatggtttcaaggaatgggctggccgccatgcggcaggacgatggcccattggttctccataagtgaacgcggcacaaaaatgtcgatctggaatgtcgcccataacataggcggcggtattcttgctccgcttgtcactcttgggatcgcgatgttcgtcacttggaaaagcgtgtttttcttccctgccatcatcgccattatcatttcatttttaattgttttattggttcgtgatacgcctcaatcctgcggactcccgccaattgaagagtatcggaatgactatccaaaacacgcttttaaaaatcaggaaaaagaattaacaacaaaagaaattctttttcaatatgtgctgaacaacaaatttctttggtacatcgcttttgccaatgtatttgtttatttcgtgcgatacggcgtggttgactgggcgcctacttacttaacagaagccaaaggcttttctcctgaagactcacgctggtcgtattttctttacgaatacgcaggcataccgggaacgatcttgtgcggctggatcagtgaccgattcttcaaaagccgccgggcaccggcaggcgttttgtttatggcgggtgttttcattgccgtattggtgtactggctgaatccggccggcaatccgctcgtggacaatatcgccctgatcagcattggcttcttaatctacggacctgttatgctgatcggccttcaagcaattgacctagcaccgaaaaaagcagccggaactgcagccggtttgaccggatttttcggatacatcggcggatccgccttcgcaaacgccattatgggctttgtcgtggaccgttttaactggaacggcggctttatcatgctgatctcatcctgcattcttgccatcgtcttcttggctttgacgtggaatacaggaaaacgggcagagcatgtttaagaaagacacataaaagattaatagttttccaacacgccgtttacatccgttttttattatgaaagacaggtagtgcttatctataaggaggagaaatcatgagaaaaaatagaatactggccttgtttgttctgtcgctgggcttactctcatttatggtaacgccagtgtcggcagcgtcaaaaggaaacctgctgtcacctgaccgtatcctgaccgtcgcgcacagaggggcttctggatatgtgcctgagcacacgattctgtcttacgaaaccgctcagaaaatgaaagctgattttattgaattggatctgcaaatgacaaaagacggaaaattgattgtcatgcatgacgaaaaactggaccgcaccacaaacggaatgggttgggtgaaagaccatacgctcgcagacattaagaagcttgacgccggttcttggtttaatgaagcctatccggaaaaagcaaagccgcagtacgtcggccttaaagttcctacattagaagaggtattagaccgtttcggaaagcacgcgaactactacattgaaacaaaatcgcctgacacctacccaggtatggaagaaaaactgatcgcttctttgcagaaacataaattactgggaaagcattctaagccaggccaggtgatcattcaatcgttcagcaaagaaagcctggtaaaagtccatcaattacagccaaacctgccgaccgttcaattgctggaagccaaacaaatggcgtcaatgacagatgctgccctggaagaaatcaaaacatacgctgtcggtgcgggcccggattataaagctttaaatcaagaaaacgtccgtatgatccgcagccacggcctcctgcttcatccttacacagtcaataatgaagctgatatgcatcgcctgcttgattggggcgtaacaggagtgttcaccaactatcctgatcttttccacaaagtaaaaaagggttattaaaagcaaaaaaccttgcgacaactatcgcaaggttttcttctatattttattcttttccggcagcagcttctgactgtccattaagcagctgagaatttatctctttcgcatcctttaagtattctgtctggtagccgctcttcagcgcccacacatagaatacaagggataccatcgcaatcagaaccatatcccagccataatgaatgacattcaggccgccgaatttatcactgcccaaataagaaataaccatcatggccagcagataaaacaccatccagacgccggctttaaagttccggccaaaccctttccatttcgccttcgcctgataatagaaataaatcggaagaccgatcaggataataaacagaacctgtcctgttaacggccagcgcgcccaatacagcaccagtgacgcaaagataaatccaagcggagcaatcacatttaagccttttaaacgaagaggcctgtacaggtctttccccgtccgtctcaatgtcatcactgtgatcgggccggtgatataagaaattaacgtagcaacagaaataatttccgctaatacgccccatcctctgaacaggaacaaaaagatgaacgaaacaatcaagttaaagaacattgcttgtcgcggaacgccgtaaatcggatgaagcttcccgaatatactcggcatgtatttgtttttttccattccgtaaatcattcgggacgttgtcgccgtatacgtaatccccgttccagacggtgatacaaatgcatctgcatataacacaataacaagccagttaatattcagcgcaatcgccagatcagcaaaaggagaattaaaattcagatggctccagccgtgagcaatatcagaaggattcacagctccaatgaaggcgatctgcagcaggacataaatcactgtcgcaacaaaaagagagccaacaaccgcaatcgggattgatttccccggattttttgcttcacccgccatattaatcgggctttggaaaccattaaacgcaaaaacgataccggaagtggcaaccgccgtcagcacacttgcccagccattcggcgcaatgctttgaccgccagtaaagttttctccgtggaatccgacaaacagcaaagctccaatcgtaagacccggaataataattttaaaaatcgtaattaatgaattcgctttcgaaaatagattgactgtccagtagttcagcagaaaataaatgagaagcaatacagaggcaaacgctagtccttccccagtcagcgttccattcttcaccaaaccgcttgtccatttcgcccattcccaaggccaagaactcatatattgaacggaggccaccgcttcaaccggaatgacggacacaatcgcaatccagttggcccagcccgcaataaaaccgataaacgaaccgtgtgaatattgcgtgtatttgaccattccccccgcttcagggaacatagaacctagttcactataagaaagagcaataaataaaatgacgaccattccaataacccatgaaataatagcagctggtcctgctatttgagccgcacgccaagccccgaacagccagcctgaaccgatcatcgacccgagcccgaccatcatgagggaaaacgttcccattcttcgatgcaattgattcatatcgtaaacacctttcatgtatgatgacattctcttgctaattatattattattctgattactttactttgtcaatatttatcgaattttgactgaaatctataataagtcaatgtatattaccttccaatacaggaatgaagtcactagtttcttcttaaatggaatttactgttaattccaatgataaaaacacaacaggtttagcaatttccaaaacgggaatgatacaggaaacactattcttaaaatagaaaggagtatcaccatgaaacaaaagctgttactttcaggtctcgctgtttcaactgtcggcatcacttcttatctattaaaagacccgtcaaatcgccaaaaggcaagagaattcattcacagcatgaagatgaaaataacaaaacagccagacatggaaacgttcccagttgataaagccggccacccggacccgcaagatatcgaggacaacaaaatggtatcagaaggctccatgtatcccgtccaatactacgatgaaaaaaagaagtaatcaaaaagctctcttcgataaaggaagagagctttttaatttaactttttcgtctgattccgctcattacgaagccgctttcaggcaatgatggcattctggcgagactgtaatgcagtgattgttccggaacatcgtattcaatctgatggacgaggaaatccaggctcgctttcatgacttcaattgtaatgccttcccctggacagcggtggcctttctcggcgtgccccccgccttgaggaatcatatcaaacagattttcttcccgctccgcaaatcgttccggccggaattcatcgggatgatcccatagacgagggtcgtggttcgttccatataaatcaagcagcaccgatgtgcccttcttaaactcacagttattccatacaaaatcttttttgacaagcgcccctaaaaacgggccgaacggataatatctgcggacctcctgcacaaacatttctctttcccggctgtttccagaccgcagccattccttatacttcggatgctcatgaagcgccaaagctgaaaacaccagaaagtaagaaatggcgacaataggccgcagtacattaatcagctcaatggctgccatgcgggaatccagctggcttccatcttcttgtgtgtgaaaagccatttcatgcagcgctgttccggaagtcgttttcagcaagccggcacgagcatcttcaatcatgacttcaatccactcttccgcacgcggccttgctcttcttcctttccaatgccgcggtcccacagcaccgaacgcgtcgaccatgtcaatgaagtcatccgctctctctttgacttccgtttccttcaacggaacacctgcccaatagcacgctacccggcacaggatttcttttgcttcttcaaataacacaacctcatctgccttctcccatcttgtgactgctgctttccactcctctgtcatcaactcagccaaacgtttttgatgcggcggtgtcatcaatgacagaaaaagcatcttccgatggatatgcgcgctgccatccattccctgaatcgcattaacaccaaacagcgatttctgcacccgcttaggcaaagcgttctgccgctggaatcgatccgtatcataaaacaccttcgccgcctcagcgccagtcatgcaaataaagttttttcccaacaaacgggcctgaaacagatctgaattgtagcgctctgttctgtttttaataaataaatacccttccttcagcagtgtcagactgttatcgagacttttgtcatgtggaatctgctcattcatccgcttaccctgccttcctttttaccctctattttcacgttatcttccgactataaacccagtaacagtatttgtttgcaaaaccaaatttaagcgctttttgattattttttaaaggaagaacaaacgaaagagagaaaaggtagttaatcaaaacgaaggggagaacaaaatgaaaaaatggatatatgttgtgcttgtgctgagtattgcagggatcggcggcttctccgtccacgcagcatcatctgctcatgaaaaacacttgaatgtcagcaaaatgaatgtcgatgatgaattcaaggatacggatggaaccttcattcttcacgatttacaaaaggatcagacatttgtctataacagaaaacgggcaaatcaaagacaaactccgcaatccacctttaaagtcgtgaacgctttaatcggtttgcaggtcaaagctgtaagagatgaatacgatgttaaacgatgggacggggtcaagcgtgaattcgaatcatggaaccgcgaccatacgcttggctcggccatgcgcgaatccgcaatctggtattatcaggcattagcgagagatatcggcgaggaaagaatgaaaacatggcttcatactctatcttacggcaacgaggatatcagcgggggaatcgaccagttttggctgcaaagctcgctcacaatatctccgctggaacaagaaacttttttggagaaactggctaaagaggagcttccatttgacaagccggtgatgaaaatcgtcaagcgcatgatgattcaagaggaaggcgatcattacacgctctacgggaaaaccggaacccgcctgactgatatgggattaggatggtttgtcggattcatcaaaacagagcatggctcttatgtctttgtcaccaatgtcgatgattccggcacaaaagccaaaaacatcaccgtggatatcctgaaaaagtatggcctgattacatcctaaataaaagagccctgcacggcagggctctaaatctcatgctcaaaacaataatgattcacaagctcttcaatcaaatcatgatcgggatattccccgttaaattcaaattcgatttcttccacaaattctccttgatggtacacatggatggctccgttttgacggacaacgctaaactccggctgaaatgtatatccgcttcgttcaattgctcccatttcttacccgcctttctcaaagcagtaattcatacacctcgtttaattccttggcccgtttttgatcctgttcattctgggcatacttaatttctttttctaatacatggttcaaaaaagacatttcattatcatctaagtcttttacaaattcctcttcatttgcataacgcttcgccagcatcttcttgcaaatacgctggcagacttcattttctagatgattcgaaagtgattcgcgcaaataaccgagtgtaacatccattttatgaacacctttccttctgctatctttaccctatagcttgctaaaatagggaaaatccatacgcgaaaaataaaaaaagagacatccgtgaatgtctcttttttatcgttattcagctgcttgttcgctttttgtcaaattggcctgcgtgcgtttgccaatcccaaacacataataactaatgaccacaagcgctaagaaaatcacgcctacaatcagggagatacgagtatcatcgttaaaccacatgccaaccagaaccatcagcaagaaagcaatcgtcaaatagtttgtaaaaggagcaaacggcattttgaatggatgtttatctaatgcagcacccttcgcttttctgaatccgatatggctgatcaaaatgataaaccaaggaatcatccctgggagcacgcttgcgctgtatacatagacaaagatcttcggcggcgcgatatagttcagtacaacgccgacagccaaaccgatcagcaccgcaattgtgccatacagcggcacaccattgcgtgaaatcttcttaaagaatttcggtgcttgtccattgacacccagtgtatacagcatgcggcccgcgctgaaaataccgctgttacagccggacattgccgcagtaatcacgacaaagttaataatgccggccgctgccgtaattccaattttcgagaacgtagacacaaacggacttccgagtgagttgagctcatcccaaggatacaccgtcacgatcacaaaaatagcgccaatgtagaaaatcaaaatacgccagataatactttgaatcgcatttcttagcgtgttttgcgggtccttcgcttcacccgctgtaatcccgatcagctcaactccttgataggctgcaatgacaagagacagtgcaaagaagaaacctgagaaacctcctgcaaagaagcccccgtgagaccacaggttcgacaaaccgatcgcatctccgccattgccaaaaccgaagaaaataattccgattcccgcaataatcatcaagataatcgtcacgattttaatcatcgcaaaccaaaactcaaattccccaaacgacttaacagaaattaaattcgccgcaccaagaatcaccattgccacgataccaggtatccaagcaggcaaatccgggaaccaatacttcgtataagaaccgacagcgataatttctgacatgccgacgataatccactggaaccagttgctccatgctgttatataacctgccatcggatgaatatattgatggccgaacgtcgcaaaagaacctgtgctcggctcgacatacagcatttcacccatcgcacgcataataaaaaagataaaaattccgcatattgcataagccagaaggacagatgggccagtccatgaaatcgtgctggcagaacccataaacaagccaacaccgattgtaccgcccaaggcgatcatctgaatatggcgcgcgcccaggcccctctttaattctttatttgccactcctcttcctcctcctaacaaaatactcataaatgagaaaacagcagacctgcttgccttcacatgaatcagtgataacaatcagaaaattcaaacttaaaattgttatataatctcctaaattacttatttcatcataataaatttctctggaaaatacaattgtttttttcaggtaaacacctttgttcagagttttgaatcgttcacttcttttaaaatcttttatataaaaataataaaattatttgaatattgggattaattcaccccttagattctcataaaaaataagctgtcctacatgaacagcttacctaataattcacacccgtttgacgctttaatgcttcaagccacccggtatctccggtcccatagctcttgctttgtcccacatctctcagagatccattgctgtaatcaattgataggatgaaatccggaatggcattatacccggcttccgcgattttactgagctctgaacgatagtaagatatagcataagaagccgtttgtttctgcactggatctttttcaagctcttccttatatacatccattaagtcacgtccctcaggcgtgacgtaccgcccatcaatcacttctaaatccttcaaatggtagcctgtaacttcatacatctcacgagctgcctgatactttttataggcctcttcggaaaattgtgctgaatcactgctttgacttttcatgatgtgtaaaaatagttctttgctgttgtctccagattgcagcacttgctcaatttgcttgatcagatcctgatcgtctgtcccgcttacccgcacctgatagtcaatcggtgtgattgtaaacgtcagctctgtcccctctggaatatgaatatggtttcgattcaacagtacttgcagctgctggttaacctgtccccgctgatacaccttttcattctcagcttccacttccccatgaaatgtgacattccgaaacacagcatcctgaaggttatagttttgcgccttccctttgaataaccattctgtttcattatcgtaagcggcctgtctttctgcagctgacagatcacttctgaaataaggagactttgaattttggtacttatccttaatatagcctaatggatcagactttgttttattaatcgcattcatcctgctgtatttttcatctagtattttgattctgatatcactctcagattcataggggttttgggattgaatcactgtttcttcccctgtgtctgtcactgttcgatcattcgctgattgatacactttgctgaacgtcccgctgtttcccgacacgctggttttagaataattgaactgattgattcccccagttgaagattgtgacttaagcctgctatatgccttttccagaactgccgctggattttcagtcgcattctcccgtttggcaggcgcattcttgctcaatatgttctgtgcaatcagctgagtgcggataaattgccgattcagacgcattgaattccctcccgagtattctctcttattcttttttatcggcgaatataatgtatatattaacctcaaaaaacatttatttacacctaaatcgttattatgtatgatggaaataaaaggaggttgtttgcatggtgaaaaaatggcttattcaattcgctgttatgctttctgtcttatctacctttacgtattcggcatcagctgtcggagtcactgctatcacaggaaacaattcatttgataccgcaatgccgatcggttattggaaatataaaaatatcgatacaacaatactggaagctggtcaagatgaagcctatttcacttttacggctaataagggagaaaaagtatacatgaggagtacataccagagcgcgtatacagggatgaaaattgaaatttatgacaagaacagaatacctgtttctcaagggacagaagttattaaccctaatacgttttcttcttttatttatgcaaatgcagacgcccaaaacacgacggataccttctatgtgaaagtgtcacgaggcacctatactggaaacatgtactttacgctttcaattgaagaccgaatcaaatcaggcagcggaacgttccaattcagcggcgttgctgaaaataaaggaaatacaagccttagcccctcaggttctgactccagcgtgatcaaggttgatttaacaaaccaatctgggataccgcgtgatgccattgtaaccagagttcaaacaaccgccactcaaacaccaagccagggaaatacacgccatctgatcatgacaagcgaaaataacgaatggagccgtgcccttgtaaacagctcgacttcagggtcttatgatatctctttgtcggatcaactcagtgtggcaaaggtatggagttttaaatataatacattagcgacagccagatcgacgatgagcaacgtaaaagcaaaaatagattatgaatacgacgtgacaaagcagttttaacttataccgagccggttatccggctcttttttattctccgtctagaaggtaaactatagtcagtacaaccaagggaagtgcagacatggcattaaaacttctaaaaaaactgctatttgaccgccctctaaagaacggcgttatcttaaatcatcaatacaaaatcgaagagtgcctcggtatgggaggctacggtttggtttatttgtgcaccgatatcctagctcaaacaccttatgtcttaaaacagcttcggccgacaaaagccaaaaaggaaaaagagaaagtccgattccagcaggaaataaaactgctcaaaaacattcaccacccgcaaattccgggcttcatagatgaattcatcatagacggacaggcttattatgtcatgcagttcattgagggagagaatatagaagaattattattttttcgaaaacagccgttcacagagcttatggcgttacaactgatttcgcagctgcttgagattatagaatacctgcatgatcgccttatcttccacagcgacatcagaacgcctaatatcatcatcaatgatggcaggctctgcctcatcgatttcggccttgccaaacaattgactcctgaagaaatggaggaaataaaggtacgaaaacaggatgacttcttcgatctcggagaaacgctgttattcttgctgtactctcaatataaaggaaaaaagaagaaaaacggcacttggctggaggaattaacactgacaaaggaagtaaccttgctgctgaaaagattattgggcattgaggaagagtatcagcacaccgcttccattcgcgaggatctaaaccgggccattcaatcggtcacataaaaaaacccttgtcccaaaagcggaacaagaactttttttggattaactgctgctgtagctccggcgtttgtaacgatgactgccgccataacggtcgtagtgtcttcttttgcccgaactgctgctgtagctgcgataatgtctgcgccggctgctgctgtaatgccggtgtctgcgatatcggtcactagaactgcttgagaggtacttaatcgttttgatgatttttttaaacatatgatgttcaccccatttctttctccctattatataaattttataggagaaagaaaaacatcagcggggtcactcttttgaaaacaagaaccccgttccgttatcatttgtatgcagctcataagtaatcgcaagcagcctgcatgtatcctcaataatctttaacccaagtccctcactgctctcattccgatcaaatccaataccgtcatcacgaataaaaacatcgccatgttcaatcgtgacttccatctttttagcttttgaatgccttaacgtattttgaaaaatattatcaaacagcctttccatccataacgtgttgctcatccatatcacatcttgatctgccggcttatagtgcagctcaatcccactcatactgtataaataatcccactttttcaccgctgtttctaatagctcgtttagacgcacttcttcatttacaatataagagctttccagcgtctcagcggaatatagattgaattcattagttaattccgagatatattcgatttgctgatacaatgattcgaatacagcctgaccatgacattggtcttccaaataaaataactgcagcctgagagccgttaaaggtgtattaatgtcatgccgcagtttttgcaaaagctcctttttgatttcctcctgctgtctcagctccagttcacgatatgtcgtccgttcaattaacaaattgaccgacttgatcagttccccgatttcatcagcacgcttcacttcaattttatcgggcaccctttgatcactcgccaaatgccgaatggtttgatttaatagattgattttatgcaacagagaatgaatcgactttgaaaataaaaaagctaacaataagagtgatatcaaaaatacaacgatcattgccgggtatgcaaacgacctgtgaaagggcataccatgattcatcggtttaaacatgctgtcataaatcaccgacatcaaaacactgaccgccagcaatagcatcggaacactaatgacggccgtaaacaataacaactgatattttgtcttgagcttcatttcttcacaacggtattcagccgatacccttctccatatatattttcaatcatctcacccgcttgatcattgattttagctctaatttttttaatatgcacattgacaatattcgggtttctatcttcgagctgccatagatattcaaagaaatgttcctttgtcaggatactgtctctattttcatataaataaaagaaaattttccgctcaatcgcagtaaataatacctcatcatgcaggctttcattgaacacttttttcgttaccgcatcaatatacaaatgtttgatttgcgtaaaggtcccataatgatgctcaagcatattccgcattcttaatagcagctctctcggatcaaagggctttaccatataatcctcgccgatctgcaaaccttgaagcttgctgtccatgtcattgcgggctgagagaaaaataaccggaatgcccagccccagctttttgatttttgcagacatttgatacccgtcttcacccggcagcatcacatccataatgaccaaatccaccttctgaatcaccgaaagcacatccgctccatctgttttccatatcacacgatatccctcgcgctgcaaaatcttttgcagcaaatcaccaatcatcacatcgtcctcaacgattaaaatacgataacccttcatcctagcgaacctttctcataaactccatggacagtttatatatttgatcaggctgatataaataaatactgtgtgttcccctcagttcctttatatcggcagtattgaattgagccgcaaacgcttcatagtcttttcggttttgtatagcatactttgaatgtctattttggtcagagactgcatctaaaatcaagacgggagtttcctttggcgcaggcagattcacagatttgctgccgttttggtaagactgtaaaagctcatgctccatatctgcattaaaaaattgcttaaagttaatggctttatagatttctttttcttcatcagttaaaaacgactgtcgaatcacctcaggattatatacagcggaaggtataaaccgatgaaaaccaatcgaggttaacaggtggaaccctctcactttcaatcggtcaactccgctcaatttatacgtgacgtactgctggggcaatccaatatccatcgcaataatggccttgatttccttaggatatttctgtgcccaatacatcgcttcaatcccggatatcgaatgaggcattaaaatataaggaggcttatttccgcttttcataagcgctttcctcgtctgttccaataccgtatcaatatctctgtcatcgtgagacacttcactgtatccataacctgcccgatctacaacagcaatcttattttcttttgaaaacttgctgtacagccccttcatttcataagcaggcgcagcaatacccgaaccggacataaacacaaacgtatccttcccgcttccctcttgatacacattcatctttttaccgtcaacatcgactactgtgcctttacctttcagcagtgccgcctccttatttagctggaaatggtgataaataaataccgagacggatacaagcaaaaccaaagcagccaagctgacaaaaacaattttgaggactttccataatgttttcatatgatgctcctttcacttgataccgaaggatacaatatgaaaataaatttctgattaactttggaacagttttttttcacatttgactttgcccttacggaaaggtgtacatttggagcatagcagaacatttgatgaatttacctactaataaaaaaatatttcattaaaaaaccttcctgcttataggaaggaccgtttcatcataatattcaaccgtttgtcgcacatacaagacggaaaatttcacaagcctgcaatcttttttaacatcttatcccaaccaacatctcccatcgttttagtaatgatctgaccgtattgacttaatagacaaaagctggggatgccttgtacgtgacaagttgtgacgatctcatagttttggtctaatacaatcggaatagctagtcccctatcaagagcatacgtcaagacaacctccatagatttctcttcttctatataggggacatgtactccgattactttcacattcatatcctttatatcttgaaggactttgtctgttaattggtgacagtttggacagctcattgaccaaaaataaagaagaagatatgtgtcacttggaaatgtaaaatcattctgtgattgattcaaccatggtaaatgacttggccattcagtcaacatttgttcatctttcatcctttcagtcctccttatctttcagctgaaaagcaatcagctttcctaatgcctcttcagccgcaaacggagcaactattcctgaaggatgttcatgctcgtattttagacatttatacatcttaggttcaatgcaagacggatcaatccatgcaatacaccaagatgcccaaaagcacgattgcccttcactttcttgagcgattttgatgacaaagggcagactgggcttcccgattctcattaatgaaatcgccgctgccattcttgtatcttccgcatgactttttaataaacatgatagctcctccgctgcttcactcgcgtcttccccaaactcacctaaaacagctgcagcaatattacacaaagagccttcctcttttaaggcctcaaccaaaactggtattgcatcttttcccgatttctttagctcacctatcgcttgaacaattgtgatctcatttgtattcgctaaattctgaacagataacgacaatttatcaccatttgaattcataaaagagcccctctcctcgttttaaaacaataactctacataaccactatctgaaacgataaaacaggcaccaacttaggctccctatgcagacgaccaccactaatgtataccagtcagcagtcaataaatgaatgacatacaaacaaatgccgctcaggcctaatgccataaaaaatgacttgtagtattgaggcaatgaaagcttaatatcgtttcggtttgtatgggtaaaagcaaaaagccttattgtcatgaaccatatatatatccctaagccatatatataccaataaactaaattcccaactgccataaaagtaatagaaacacagtaaagaatatacaaccagactgtattcgtcagctctagaataatgatttttttccaaagggcaccggggaataaatgaagggtgcctgattgagaatgtctgacaattcctgaataataggaacttaacatgactgccgagacgataagaaagaatagaagataaaaccattctggatacatgaaaatgacgacataaaagacgccactgagcatgaccgtatgaatgctatgaaaaaataaatattttttaaaaagcaacagttccaaccacagaaaagaccaaatgccatttagaccttgcaagccccaccaagtcgtttttggtttctgtataatttgacctgaaccaaattgacgttcttgaaattcctcccagaattcagcttctttcaccaacgattccttcatttctacctgacggctcgtaaaagcaattgtcataaaagagactgtgataatcccaataaatacaaccacatacaacggtgacaatgtatcaaacactaatccaacgccactaataaaacgggcaatgctctcccatatcccagatgaatgttggagaaagaagaagcgataaagacatatggagtaaatgcctaacattagaagaaagactaaaacgtatacccttttcattttcttcactgttctggcacaagagaccgacatcaaccacacttcagcgataaaaaagagccctacaaaaattatggatcggcctaataaattgatatgatcaccagacagaagcacaattaatacatcaccgaatatggctgagatgatccaaagcaacgccttccaagtgacgctgaaaaataaaacactatacacaacttttgaaaaagatgtggcagtgccataaagccatataatatctgccatttgacttggtaatcgatttgaaaaaagtccaaatgccgtataaaggataaaaacacctgtaagtacccaaccagcaatactcatatcccatgtcgtagatctagaaacaaaacttacttgaaatccgatggccccaacaaaaaggagcatgatcaaaaaaggcatttttttttcctgaccttgacttacaaaacgcctttttgactgaagccataaaaaagaaatgatattattcatctgaccattcccctagaagacgaatcacttcttttctccattccgcttgttcttcgaattgaggaacatacaaatcctgcatgagtttgccgtctctaattaatatcaccctgtctgctgtctctataacaaactctagactatgagttgatacaaatgctgaacacccttgatcggttttagtttttaaccagttagagagccactgttttgatgggatatcaaggcccacagtcggttcgtctaatatatacagcaaagcgtcttgaacaatcgcccccgccaggacaacccgctgcttttggcctcttgacagctgaccacacaattggtttgctttctcctccaagtgcacttccttcaatgcatgataaaccctttcttttacatcttttttacctggatgatatcctcttgccctaaactgaatatgttcagcagcagttaaagcgggatacaaatatggctgatcaggaataagcgcgacttttttttgaacatttatatctcctggaggagaaccctcaatgaggatatctcctttatccggcttatagagacctgtcaaacatcgaattgtcgttgtttttccagctccatttggccccaatagcgccacgatttctcctcgttgaattgagaaagacaaatgttcaaccccatcaccatttcgatagcatttgcttaaattttgtacttgcatcaattgcatcaaatcttctcctaatcattagagtgaagtatgctttggctgatcatgatgcatatgtttctgaagcttgaactgccacagcggcatacagacgagtactaaattatgaatgaaatgagctactaatacacaaataaaaccaaatttgatgaagagaactcccagaaagcaaccgaatataaatagatgcagccaacgtatccaccttgggtcatatccagttacttggtgcatcaccgcccataaaaaggaagatacaataatggagatgaggatatttccactcatccaccaaatgactggaatcattaatagccgatagatgacctcttctccaattgaactttgtatgctcatattcaatccttgcctaaaggtaaaacctgatagaaagacagttcggttagaaagctcaggtgaaattcgtaaatattgctttttctccaataagttaaacagcagagaagtcactcctaaactaatgagccctgctcctattccatagaaaatctgaactattggttgttcaaacgttttccatccaaaatcaccagcaagcgcatttcctgccaatgaacatataaatactacaaatcctgttaataatcctgtaagaagtgtagacaaaatacctaataaactgaccgttttgacactcattcttgcatcataagcatttacaattgttaattgaatatcttctttcagcgtcaatgactggcatattataatcaacaaacccagaacaagactgaagattatgcttgtttgcacatccataaatacaaggatgagaatcgcaaggatcatcgctaaagctgaacccagcataccagatactccgaatgtcgattccacttgttcatctcgaatgactttactcatttgatctgttagtatttcttgttcagtaccaatataagaaattcggccgccctgtaattcaacagtcactttgagccgaatatctcccgcttccgctatgtaccaataagtactgacctcgcgaaaatcctcctcttttttaccagtaccagtcatatttgctctagaccaaagtccatcaggtgaagccattaacctctgcttgagtgtctctggagaaacttgttcaaacttccccgaaagggtttttttcggaacatccgcataaaaaaaagtgatttctcgattggcattgacaccaactacaaatgattgattctggtgaacgaaacggactctccatgattcgaccaacccaacatcatataaaacctttctatttttcttaagtatgcctaagtgatgaagtttatttactgtatcgtggtcataccaatatactgaataaaaatcccagttctctacatctatcccaacaaactcttttataaattgaatgcttatttcttttgcctcatctttgcttaagagtagtgaagcaattgttgggggtttgaatttaataaataacagtaatccaacaactgctaaaatactccagaacaccaatgatagactattcattcctgaatccctgccttgacttctttttgaaaaggtaagtccggttcagatagctcaattttccctatacatttgcaattttttgcttcacattttaactgaagcaaacgagcaggtgaaccaatgtcagccatgctatcttctaaaatatgccctagcggcaaatcttctaattggcaaggagttacgtatccatctgctcttatataccaagcaagatatcctggtgtacaaaaatctgttgtgaacgaactctcttcgtgctcccaatcaattatgttcaggcgatctccccatttatgacgtgcttccctaagctgtatttgaaccatttcttcaaaatcaatatccaaagccttaaagccttctgtcgcacgtccaacagataacgtttttcctgcacgaaagataaaagcacccgcattggcacattgctccaccacatctgatacttcatcagcattggactcattaatggtcatagcgacaatcactggaatgtttgcttctgataattttttaatggtattcatactttctttaaagccgccttttctgcctcttaattggtcatgtgtattatccataccatcaatactaatctgtacagaaacattgcctaagtgactaagtaattcaacttcttcatctcgccagttcaatccattactaaatacattcacattggtaaacaacgaacttgcaacaacgactaattctttaaaccctttgatcagctttgcttcacccccggtcagcgtaatatcagcaactccatgggctgctagcttttgcataaccaatatccattgttcactagataattcctcaggatatggtttacctgagctggcatagcaaaacgaacagcttaaattacaagcatttgtcaactgtaaggtacaactaataggtaaatatgaatctagcgaacccgaaacgtgtaaaggctgatctaacagcccttccgtccaagcctccgtaaatggatgggcactaagctcttcttttaattggtcagcactcatctcttcttttttcataatctcccaaatacgtgccgttttatgaagatttttgttttttgataacagaaacgccaactgtgctccacgtccactgagtctgaaataaaacatactttttctatcaatcattacagcaccatgaggctgtaaatgaaccgctaactctggcaaatcaaaatctttaacacgatcatatgacatataaaatcccccttaagagaaaataaggagtataagcaaatacgctcaactccctattctcaaatgttaaatagctctcatagcaggatgcggaagtgcacaaacacgtgtcatagcaatactcttcgaggcccaacagcccatgcagccagcagctttcacaatcgaagtacctcccggcttcataagtccttttttactcacagattcccattctttttggtttcttttcataagtaaacctcctctcaatttttgcatagagtctattgacatagctcccatgcgatacgataataccagattgcaattgtcgaagtaagggggattttgtatattatcctaaaaattacattaattagtataaatagaatattttaaccctttaaaaatagaaaagctgacaagctatcctctcgagaaaaacaggagctcacccctaattttccacttatgttttgaatattttcttgttctataaacaaaacgtcaaaaagacggtccattatgttataaaaattctgatgcctaatagattgacaaaaaatctcttcgaggaaattaaatcaagagattattttcaaataaactttagtgattaagaaagcaatgactttggttaaatgaatgaagtctcctgtaatttaaatcaaatatctatactaaaaaccccttcggctaaaatatccagaggggttaaacatcttactccacagtaacactcttcattacgctgcttatcgacatcacaaccgagatgcagggcagcattagtaagcaatcagctgcaatcgacaacggaaacagagcaagcgctgtgtttacttccggcaatacgaatctgtcatccgcattgtctaggcctttcagcgagatgatgcaagtgtttactccccaagtggcaacttccttgacgtttacgcggatgttcaggtttacgttctcttgtgtttccagtgttcgatcaaggcaatcgtactgtacttcagctcgccgcggcaaagccttaagaaatctcattcagcttcagtgcaccttcgacacatacagaacgatgtcggcccttggaagactcatgcatggactgactacgctaaaaaaaacacccgcttgtataacgagcggatgttagaactttcgaaattattgattgatatcttttagcgcttgtttcggttgcgaattgaaaatcagcaatgatgcaataattgcaatcataacccctaacgcaccaacccaggtaatcgaggccaatgatacgttttccacaaaaacccctcctatacctgcgccgaccgccatggcgaattgcatcattgactgattcatgctaagcaaaacacctgacatttccggttctattgtagccaggtgaaattgctgtgtcggaccggtggaccatgcggcaaacgaccataatatgagaatcaccaacactccgatataggaatgagtaacaagtgacagcagaatcagtgtgacgatatgcaacgtcatcccgccaacgagtgtaaagggcactccccatttatcggtgctatatcccccaaacttcgatccaaccaaactggcaattccaaatataagcaaaacaccgctgagcagcttgccatttatacctgagatgttcaagagatacggtgacaaataagtgtaagcaacagaatatcccccgagccagaagaaagtgattgataatcccatagccactttccgttttttgaaaagagcaagctgttgaagcaaaggcacaggcttatccccttcagtatacggaagagtaaagaaaataacgaccattgcgatcaatcccaacaaagcaatggctccaaatacagacttccagcctaatgctactgctatcattcttccaagcggaacaccaatgattaaagaagcggtaaatcccatcacgaccgtagcgatggcactgccctgcttcccttccgatgcaatcttagcggcaatcgttaatgcggtgacaacaaccacacctgctcccatcgccataatgatccgcgctgcaataaaccatccataaccaggcagtacaaaagccaggacattaccgaacacaaacaaacctagggcatacatcatcaatttgcgtctatccatacttgctgtcaacgccataagtacgggtgtagaaagagcatatacaagtgagaaaatggtaataagctggcccgcggcagctaaagtgatcccgagagtatgagcaatttgatccaaaattccggaaatgatgtactctgaggttccaactaaaaagctgacaatggctaaaatataaattttccaagtgttagacataaaacattcactccttaattattaataaacatatcacgaattatcgatatgttattataaaaaaataaacacatcgtaatatgtcgatatgtatggtgtaaaaataaacatcttttgatgtttatttttatatctctgttttaagaaagtcagcaagtttcccaatggcttcttcatctcttttataatacgtgtactttccgattcgctccgccttaattaggccggctcttaaaaggatggtaagatattgagaagctgtcgattgcgtcattttcaatttgtctgttatttgactgacacataccccgattgtgttcatatcaatcccttcatggggtgcaaaatgacgatcgggctccttcagccattgtaaaatttgcagccttgattcatttgataaggctttgaatacttcaattggttccatatcgattattatatcgttatatttcgatatgtcaatccgttttttggatatatttaattaaaggtttatctctgactaattccgtgaaatgaaactgaagacagcatatcaattttgttcaccgcttaaatttatcagcaagctttacgaagttggtctcataatcatgtcactaaacacttggggaaacccggcaggtgacaaggatgttttcaaatattgttcaagtgactaatcaccagcatcaaattcatgtatttaaaatagatgtaaaaaaacatccgctcataacaacagcggatgttagatctttcgacaggaataacatgacagtgtactatgaattgacatctctttatgtccgcttaggatatgaataaaagttatcaatgataccataattgtaaaacaaaagaatcggcagttctttatgttcaattcacaacaaattccacaccgtcaaaacatttattttctttagattataagatcttttccaaatttttctctagatcattacataatttaaataccatcactcgttcacctgtccgggagcttaaatcagtatgaaaacttttcactttttctccggttatttttaagataatatccttaaggccttctatacctgattcgactaactctgaacgagtttgtttgatagataacataccctcttttgatccacaaactacatattcggctggtgttaaaatcccttttaaattgacgatgatcatgtcccgcagtatatcagtcttaacagatacagacccccgcccaagataatccttctcccattgagtaatggacttactgatctctgattcaatagaacccttagactttttcatatctaatacatctcctgagcaaaaaaattggcatattctatttgtgatttcgtctcattaatattctcttacaacatatccttcatatacaccttcaatatccaaatcagttttaccgtttcttgtgaccactatcattttggataacatattttcttccatcatagagtggacatgcaaaaatcgaacatttcctgaatgggtttcctcaacttcttcataagactttagatgataaaaatcaattgcttttctaattagtttttttatacattccatattttcacgatcaaacgagttcatttcctctattgttttcgtgacaaaatcagttaaattagcgctcatacaatctccttagaactgctttctccatatatgggtgcgtttagaagttaaacctgcatttcatcatgacaagcaatgatcaggcatggcttgacctgttttaacatcaggaacctccgcgattgagggttttccacccttatgattaacgaataaacctctaactttaacatatgacggcactaggggatgatgtcgaatcatatcaacacttttttcaatggtgtcactgctattttcatttagccattcatcgaccgtaccacctaaaaattcaggcttgcaattttgaaacagataatccaatgtttgtattttatctttcattgtttcaagttgagttagtccattacctgcagaagtcttcttatcttttgttcctactacaaaaatctcctcaacatcttcctggtaaatcgcaaaaataacagacctcatgatttctccataaggatgtgaaatactggcaccatagctttgtatagtcaacatattctctgcagaagtgttagtcgcttcttgtaaaataggctccaaaccgttttcaatatccgtcaaaaataatacttttttattttggtttacattcatacagcacacctcttccttatgtttatcatttttgtattgagtaacaaatccatttgataaatgcttagattcatcattaccagctttcccaacatccttctggatcaagactagccagtcggacccatccattttgaactttttgcagaaatgctgaatcatgatttaataaccgttctacatattctctaggtgcttggatgagtatcaataaacgaagaggagaatgataggcctcgtgatctgattccatgacggattgccaaggcagtccggctaacaaatcgcttgcattcccctgcataacgccgagacctgcagtaacggtttgagttgctttatttccgctgccataataatgaggtgctaccgttgatgcgtaatattgtaaattaatccattgggctacagttccaggtcctacaataatatttgctaggagttcaccgctttcatcctgcttccaatcataattatggagaaaggctctgccttccaaatcacaatcctgagttaattcacgtttaccgataataaaagcggcattacgagccagtccccattccggacgtatctcactccaatcttccgcaaatcggtttgcctcagccttcggattttttagcttcgattggaaattcggtaattgggctagacgttctgcgtttacatgatgtctcactttcggcataacggcttcaatttgttcaaatgcttcttgtgcagcttcggaaagctctggtacataaagccaatgtaattcatctactgttgtattatgttcagctgctgcaaaaactgtatcctcaggaattttaattccttcagctaaaagagcttctcgtacctctgatagattacataaagcagctaaaactcttgcattgaatccaccggccgctccaccacaggcaccacaatcaagggctgcagaataaggattattagtactttgactgccatgcccacaaatcacgaccaatggtgcgatgttctctgttaaccccatcatttttaatgcttggcgagcatagttcactttttcttcatcagtaaaacccacaggtatttctgcctctgtagcatcatgatgaagcgagagttttgtatcaggtttgcgtaaccaagcctcacggagattacgaatgaaacgacccgcctttcttggcacaaagctacgggctgccatttgcagagtaagccaaggtccacttagctcaggcagtagtaagctcgaaagcgcattctgcttcatcgttttaaaggtatggcttaaagaatgaattgcttgcttccgttgattgtattttttgaatacatcctcatctgcgaactcttttattttattttgcggtttttgtatgatcggcaaggaagcatgactgtgtttactgccaagttcacaagttgcaatcggcaccccgaagaaaccagcaataccaatcgtttcaaacgggccttctttttctagttgacgacgaaaaggttctgatcgtacatcgatgcagaatgctaattgagctaatgcagatttttcacggccggtttcacgttgtttcgagatgatcttctggcttaatcgatcagtgtacgtttgttcccaagcttctaaccaaagtttcttgcgaagtttctcatcaaagctgtaggcaaatgataaatattcgttttgttcactggccgtcatctgtgaccattcttctaatgtaagcccaccccaatgaatccaagctgctataaggggagcaattgaaattgttttcttagatcgttcattagtcaaaggtaagtatggctttataagagcccactccatggatattcgaaccgctaaatattctgttagtagtgcatgttcgtggctcgattgttgggagcgccaaagcatcatccctgcccatccaggtaatgaaagtaaatgaccttcaagataagtctggatttctgactctgggatttctagtgcgaataaagcttcttgtaaagccaaatgtgcctctttcggccaaccttttaccctttctcgctgctttttgctaagtgctggatcatattgaataagatgctgccaagcacgatagaaaccttcctcacgattaggcattgtccaacccgcttgagagtcatcaagatataatttactccatttaatgacatgatgatctagtatattgactagcctttcaccatcttgattctctatatacgaacttagtggctgcataaacacattctcgatatgatccaatccactacattcacttactaatttctccagctcatgtgatgataaaaggtcggaaggcaggggatctaactttaatgcagcatgacaaaatcgctctgctacgtcccgtgggatgtgataggaatgtgaatcaagccaacgctgcagccccatttccacaaaatcttcatcaatctcacctttattctttgctgaacggatcatagacgcactagggtatatatcaacatcgcgagtgtttttcaaccaacttgcaacctgatcaaaaggttggttttcaagtcccatccacggattacgtgcagcaaatgtagaaataggccaaagtggcgcaatcactcggctggcagatgtaatgaaaacgttaagatccctttcttgaacatcaatatctgtatctatcttttttacattatctttcgttaatacggatgtaatgcccatctcagattagctccttatgaaatatattgtttaaggtagtctgggtgactctctactgactttggttttgcttcacctaatcggactaaccaaagatagagtaccgcgaaaaaaacggaagaacgatgacgagcaacccacgtacctaaagcactgccaaagagtaagagacatacgacaatcatgacagctgacattggaggttgaacactttgaaaaatggttgtatgcagccacttatagaaaaggtgatgaatgataaaatatacgagggctgctcctcctaaaacagttaaaccggcaatccggccaattcggccctctccaaaagcgacaagctgatcccaagaaacggacaatgaccaccctaagatcagcgcactgattaagtgatacccgtctccaggagcagtgagccaaaaagcaacacctataactaaggataaaatccgaccagccatgacccataaataggatgttctttcattagtgcgagtcgatacttcatgacgccctactgctgaaccagcctgtagaaacaacgtagccttgaataaaccatgtaaaataaggtgaataatggctgctatataggcgcctaatgcacactgaatgagcataaaccccatttgtccaatcgtggagcctactaactggcgtttataatcaacctgaactaaactaattccagttccaatcaatacagaaatgctagcaagcagaagtaagataatcgaagcgataccaccatgaaatagaggtgaaaatcgagttagtattattcctccagcatttactaaacctgcatgcataattgcagaaactggggtgggagcaacaatagactcaaccaaccatctttggaacggccattgagctgcaggaatgatcaccgccagtacaatcaatagctgaatccctgttctctcccattctcccagcccagctaaactttcatttgttacaaccaatgatagctgccattgacctgtggcatgaaaaagccacatcatcgcaaaaaacaaagaaaaccaacttaacaaaaataaccgtccagaaattttggctgcttcactagccacttgccaagcactgtttaaccttataagtaaggttaaaccaacaagagttgctccccaaaatagaaccatcaagcggagatcaccacttaaccatgtcattgaagcagctcctgttgtgaaagtaaaaagcgtaaaatattttcgataagatcgatcccccattaagtaacgtacagaaaaacgctgaatgatgaatccaattgcaagaacaaagaaagtcattaaacaagctaaggaatctaagtgccaagggccaacatttccactcacaccactattggcaagaatcagtaaggaaaccaaaagtggtaaagccaagatcccaatatgaatgcgaacaaaactcaagggtacacgcggatgtaaaaacaatagtccactaatcccagaagccataagcataataaaaaataatgttaataatgatgacaaactcagcgaaactaacattctaaattctcccttttttaaaactcattattggtcaaaagacctttcaatcagatcatatttgtctattatttatttcaatttttatttatctctatttttttccaacaaaaaagccgacaacttcaaaatttcaatgattatgttagatcattgaatcctgaaaattgtcggcttcacttcaactaacttcagcgaagttttttgaagagctaccttattattggtctttactttatgctatgttttcatttcctttaatatagtcctgattatcaaataaatcgactcatgttctcttccttttttattaggatactttttcatcctatcaatatttaaaatgaaatatgaaaagaatgctaaaggcctacatattttaaaaggaaaaataaacatctgcatcgattattaagttacgtataagatatgctaaattttaaaagttgtcaagtttatcagtaaactggtctttactttcctctaaaagaatccaacccattatagatgattcactttcaatgaggaacatccatttcagatgaagctcgcttttccagatcgaggagcagtgtcttcatttcaaatccgccccgatagccagttaatgagccattctttcctattacacgatggcacggtacagtaattaataccggattagccccaatagccgcacctacagcacgaacagctgctggtttatttatatcatttgcaatgtcggaataggatttcgtctgtccataaggaatttcacaaagtgcattccagacggctagctgaaattgcgtaccggcgtactcaactggaacagtaaagtttttccgctttccttctagatattgagtgatttcaacggcatagggttcaagcttatcatcatcttcaacaagaagacttcccggaaagcgtttcctagcccattcgaacaattcctcgattggtttgttctgtgaacctacaaacacaagcccctttaaagttgaagcaatataaaaattccaatccttgaacattagtaaagaccaataaagggttggtttatttgtttccattgtacgtttcctccattttactcatttgacgaaatcgtgctggtgtctgtccagttttctttttaaataaagtaataaaataaggcgcgttagctatacccacacatatagcgatatctccaatcgctttatttgtctgaatcaaatactttttagccgcgtgtactctaacttgttgtatatactcaaccagcgtaatgcctttaatttttttaaatgttcgatgcatatgatacggactcccatgacaaatatctgctaacgattctagcgttaatttttctgtgaaatttttatcaatgtattcagtaattaaatcaacccactcgctatcaggcattttttcattagtgggcttgcaacgtttacaagggcgaaaatttgcgcggagagcttgttctgtgtttggaaagatacatacattttcttttttcggaacgcgagatttacaggatggtttacagaatatccctgtcgatttaacagcgtagaaaaattgattattgtacgctgcatcattatttataattgcttgccacttttcatctgttatcatttctgcatcattcgaaattctatgatcatggctctctttatgtccgttattgatactatccggcatttatctcacctctccttacaatgctcatctaattctttgaattgaatcccaatttaaattttcgacacgcgttttttatatcttgggccatttttatctactcccgtttagcattcttgataactacactataacctcataaatagaaaaaaataaggtggttagaatgtaatagcaagataacaaaatgagtaaagatgattatgtgataaactaatttcaaccagcgtgagttttcttataattatttaagataaggagaatgaaaaagtgacatggcatgaagtcaatgatgttattgtcattacattacctgaaattttcgacatgaatgcgaaccttggctacctaaccagggaaaaaaatgaatgcatgtatgaaatagagaacaatatcattacaaaagttatagccattggggaaattcggtccttagtgcaggtaagcgtaatcaataataaacaaatgattgttcaattcctaaacgattctagacctgttgagcagtggaaacgggaagagattgtaaaatatattcatgaatggtttgatcttgataacgatttaactccattttatgaaatggcaaaagcagatccattacttaaaatgcctgcccgaaaattttatgggttgcgagtgatcggcattcccgatttatttgaagctttatgttggggagttttagggcaacaaattaacttagccttcgcgtactccttaaagaagcaatttgtagaagcatttggcgattctattgaatggaatggtaaaaagtattgggtgttcccaccgtacgagcgaattgcacggttaacccctaccgacctggcagatattaaaatgacggtgaaaaaaagtgaatatatcattggaatagccagattaatggcaagtggagaattatcgagggaaaaattaatgaaaatgaactttaaagatgctgaaaaaaacttaattaaaatacgaggaatcggtccttggacagccaattatgttctaatgcgctgccttaggttcccgacagcttttccaatcgatgatgtgggtcttattcattcgataaaaatattacgtaatatgaaccgaaagcctacgaaagatgaaatcttagaaatatcggttccatggaaagaatggcaatcatacgctaccttttatttatggcgtgtcctttactgaatcatttcaactttaaccggaatgtactcaataaaaaaagaatgaactttaaaacctaatcccacaagtacattgtaagtgcgacttctagaattctttgccctttattaattgtcaataaaaaaacacgttatcattccaataggctctccggttttcggatttctagcatgctaaattccaactgctatcaaaagcgtatcttaatgaggaactgctctcttatatctgtattaacattagaaaactcagttaggcaaaagcagtttctctccaagttttaatgccttttaacctgattgaccgatctaatgaggaaacatcttaaatctatagccatggtcgatcgatagtcgggtcctgtaccatcaacttctttaatccatttttccactgtagacgttctttcgcttttggacataaaaacacccctttagataatcttatccaaaggggttaaacatttattactccacagtaacactcttcgcaaggttacgaggtttatccacatcacagccgcgatgcagtgcagcatagtaagcgatcagctgcaatggaacaacagataccaacggagcaagcgctgggtttacttccggcaatacgaatctgtcatccgcatcgtctaggcctttcagtgagatgatgcatgtgtttgctccgcgagcagcaacttctttgacgtttccgcggatgcttaggtttacatgctcttgagttgccagtgcgaatactggtgttccttgttcgatcaaggcaatcgttccgtgctttagctcaccgccggcaaaaccttctgcctggatgtaagaaatctctttcagcttcagtgcgccttcgacacatacgaagtagtcaaggccgcgtccgatgaagaaagcatttctggatacagtcaggtattcacgagcgatcatttccatttcgtctttctggtcgcatagagcttccattgcgtttgcagcgataccgagttctttgacgaggtcaaatccgatattgatgccatttttgtcagcagccacagaagcaagaaccgccagaactgcgatttgtgcagtgtatgctttcgttgacgcaacagcgatctcagggcctgcatgaagcagcaatgtatagtcagcttcacgagaaagcgttgatccaggtacgtttgtgattgtcagggctttgtgtccgagcgctttgacttgaacgagtaccgcgcggctgtctgctgtttctccgctttgagaaaggaaaatgaagagcggtttcttagacagaagcggcatgttgtaggagaattcactcgctacatgcacttcaaccggcacgtttgcccacatttcaatatattgtttaccgacaagtcctgcatggtagcttgttccgcagccaatgatatagatgcggtccgcttccgctacagcggcagcgatatcgccaggcacagacagcttgccgttttcatcttgatacgtttggatgattttgcgcataacaacaggctgctcatccgtttctttcaacatgtagtgagggtacgtgcctttttcgatatcactggcatcaagctcagcaatataagacgcacgtgtaatcacgtcaccatcaaggtttttgatgacaacttggtcatcagtgacgataaccatttctttatccatcagctctacgtattcgttggttacttgaagcatcgccatcgcatcagatgctacgacgttgaatgtatctccaagacctactaatagagggcttttgtttttcgctacaaaaatcgtttctctgttgtcgttatcgaataaagcaattgcataagagccttttaacagtgtaagtgttttgcggaacgcttcttctgtctcaagtcctccattgacgaattgctcgattacttgaacgactacttctgtatcggtgtcacttttgagctctacatcttgcaaatactcttgcttcagctgaacatagttctcgatcacgccgttgtgaacaagtgtaaagcggcccagtgcgctttgatgcgggtgagcgttcagatagcttggttcgccgtgtgtcgcccagcgagtatgcccaattccggctttcgcttctacattggcatccacaacttcacgaagatctgcaatgcgtcctttttctttgaacacatggattccctgttcgttggcaacagcaataccagcagagtcataaccgcgatactcaagcttctctaacccttttaataaaatttccttcgcatcaagctgaccgatataacctacgattccacacatatttttcttcctcctaagattgtaaaaggagacgaagaaagtcaaatttcaaggggactttcaatcgtcccctcctacatgttttttggaagatcatgtgatttctctttgttcaaggagtcacccccttggtttgaagaaatccttacggctgtgatctgcacactcagccgggaggcatccgccgaaaattcgataacctccatcctcgtcaactaagcctttttccgggcgcttagttcgggcgctataattataggtaaagcaataatcccgtcttcttttcctattgagaaaataagaacaagacaagcttgattttacaacatgtggcataaacggtcaattgttttttaagcaactttgccgtatgtctcacaattatcttatgtaaacctcgcttgtcttgttcactctctgataatagacttcgttactctaatcccatttctgaccggacgacttcaacaatgcgattgacatactcatcgcacagctctttcgtcttcgcttcagccatgacacggacgagcggttcagttcctgaagggcgcaccaaaatccggccgtcgccgttcatttctttttcaacttcagaaataactgcttttactttttcattttcttcaactttatatttatcagtcactctcacattgactaacagctgcgggaacttctgcatttcagctgcaagctctgacagcggcttgcctgttgcttttaaagtgttcatcagcataatagcagacaataatccgtcccctgtcgtgttgtaatcaaggaaaataagatgtcctgactgctctccgccgacgttgtagccgtcttttttcattgcttctactacgtagcggtcgccgacagctgtctgcacgcttttgatgccttctttttcgagcgccttatagaagccgaggttgctcatcacggttgaaaccactgtatcatcctttaaacggccctctgatttcagatgttttgagcatatgtacatgatttggtcgccgtctacaatatttcctttttcatcgacagcaatcaggcggtcgccgtcaccgtcgaacgcaagaccgagatccgcgtttttctctttgacaaacgcgctgagcgcttcgggatgagtcgaaccgacgccgtcattaatgtttaatccgttcggggaagtccccattgtagaaacatctgcatctaaatcagcaaacaggtgtgtcgccaaggatgacgttgcgccattggcacagtccaatgccacatgaatgcctgtgaaatcttcatcagctgtctgttttaagaattgcagatatttttgtccgccttcaaaataatcgtttacaagtccaaggtctgctccgacaggtcttggcagcttatcctcaggttcgtccatcaggcgctcaatttcagcctcctgttcatcagaaagcttaaatccatctcccccaaagaatttgatgccgttatcctgcactgggttatgagaagcggaaatcatgacgcccgcctctgcatccatcgcttttgtcaaataagatacacctggtgtagaaatgacacccaggcgcatgacttctgcgccaatggataaaagtccggcgacaagggctccctccagcatatggccggagatgcgtgtatcgcggcctatcagcacttttggacgttgtttgtcttttgtcagcacataaccgccgaaacgtccgactttaaaggccagctcaggtgtaagctcactattggcgacacctcttacaccgtctgttccaaaatacttgcccattttataatcgctccttttttattccgatgaggattgtgaattcgcagtggattcatcctcatcctgatcttggttttgatctttatttccgtcttggttttgatcgttgttgtttttatcagtgttctttgtatcttcttgctgattgttcttttgatcatttgtttgtttatctgtgtcctggttccctgatgtattgctgctgttatcattcgttgatgtattgcttttcttagacgtcagcttgattttggcgtttttccgccccaaggaccaagttacattctgtggcccgttcacttcaagcttcacgctatgctccccgtcctctaaatctgaaacattcacatacaattcaatatctgattttttcagtttatttatattcgtgggagagcctttagccgttacatctatcgcttgtgattcaggatcaagaaattcaatgttttgtgagctgctcagccctacagtcttgatagggacattctcgaacttctgatccgcttcactatcgacttctatatgcaaagtcacctttgacggtgagatttttttgacaccgtcaggaagcggaatatctgcctcgatatcggaatccttgttaattttacttaaatctaggctgacgccgtcaataaattcaagagaatccaacacatcctgtgagccgtaaaccgttacctcactggggctggattcaatattcgctatgctgacaccgtcaggaaggcttcctgtccgttcaattttaaagggcacttttttactcgggcttgtcaccggaacggtaatcttgatgaccgagggctccacgtcgacaggaagcgcgtttccgtctttatcatagacagtcactttcgcttccttttcaatcgtttcatctgcgttttccaaattcactgaagcttttacaagagaaatattatcgatcacatttttcgatccggtaatctgcacatttttcggactgacaatcggctgctccggagaatagccttttttcatcttgcttttgttgtagtactccacttctacgggaaaacttttggtcgtccgttcctgaatggtcactgtcgtaacagacggattaattgagattgtcagcccatccgacacgtttttggccttaagctcaaccttatgtgtgccggttttcaaatgttccatatcggcatatatttcaaagtttttggtctgccgagcctttttcacggcgcttgtcgagccttttatcgtgacattaaccgtttgcggaacacccgtcacgacgtaattttcatcatcataatacgctttaaccggaatatcagtcagagttgcttcatcagttgttgatgtcggaaagaaagattcacccggtttttttggagtcggtgcttggttgctgttaaccgccacataaagcaagagcgcgaaaagcagagcaataattttcacagcccagcggttgtttaagaatttatccatttttcttgcccctccaataccagcggttagaagaagtgtctctggtgtttttcttaaactcggcttcaagcatttctttcagcgcttcttctgtaagctctctgtgaaggtcgccgttctttgccacactgacgccgccggtctcttcagacacaataatcgtcaaactgtctgttacttcactgataccgacagctgctctgtgccgcgtgcccagttcttttgaaataaacgggctctcagaaagcggcagataacaggcggccgcggcaatttcattatttttcataattaccgcaccgtcatgaagcggggtgtttggaataaaaatattgatcagcagctcagagctgactttggcatttagtggtatgccggtctcaatataatcgcccattccagtatcccgctcaatggtcagcagggcgcctatacggcgtttcgccatataattgattgcttttgtaatggcctcaatcgttttctgctgcgcttcttcaacaggcgtgccgctcctcgaaaaaaagcggccgcggcctagctgttcaagcgctcttctcagctcaggctgaaaaataataataattgctaaaaatccccatgttatcgcttggtccatcagccattgaagtgtgctgaggcccaaatattggctggccatacgaacaagcacgatgactacaattccttttaacagctgaaccgctttcgtgccgcgtatcaccataatcaatttatatatcacataccaaacaaggagaatatcaacggcattgccgaggtactgcaaaaaagggatatcctcaaaagccatttcctcgtcctccaagatttcagtcatttcgtattttgtgttttacgtgttacgcatatgtactttacatagcgagcccattataccacatttcgatttagcaagtgaaatgtgccagccctctcagcccgcaaaaaaagagcaaagcggctaacgcgctttactcttctccgttcggattgaatgcatcgagtacacttttccccgcagacttcatcttgtaccatgtccagtcgaataactgattgatttcttcaatctgaccggtgacttgtccagcagaggccatatacttttcgccgtttacgacggttacatccccgtctattttgcctttaataatcagcttgccgtttttgacagtgacatcacctttgaccgtctcaccttctggcacggtcacagtatggttatgaaccacaagattcggctgcttggacacgctgaaattgtggtcattatgccagctgttaaaaaaacccccgcccatcaaaatgatgaataccgcagcagctgcgataacgggatgggttctgaaccatctttttacagaagctcttttcttctccttaggcaattttgccatgacattagcggtaaaatccgcgggggcttcgacatgcgatgtgctccgtacgagcgctatggatttctccatctcgtaaaaatgctttctgcatttctcgcatgtctccagatgttcatttaatacgtgttcatcttttggaaggatatctccatcaagatgcatatgcataagctgcacaatttgttcaggacagctcatttcatcaccccacttaaagatcccttaattgttttctaagagcctctctgcctctgtgaatccgcgttttcacagtccccacaggaatgtttagaatctccccgatttcaattaatgagagttcgtcaatatactttaatacgatgactgttctgtatttgtcaggaagctttaaaattttctgctgtatcgtgtttgagagctccagcgatacaactgcatcttcaggcaaaacaccatctgcgacgatttgagaatacatggtcaagccttccgtaccagccacctctgcgtcgaggtaataatccggcttctttttgcgaatgcggtcaatggtcaaattggtcgcgattcgataaagccaagttgaaaatttccggttaatatcaaaactgtcgatattaacgtacgctctgatgaaagcttcctgtgcaatatcctccgcctcatgcacattgccaagcatacggtagcaaagctgataaattttatctttgtaaatatctacgatgtccgcaaatgcatcctggtcgccttttttgacttgtttaattctttttttaatcatcatttccatatttatctaacctctgccttcaccggtctgtatgtatacgagcttcgtttcaaaaggtttcaatttttttataaaataagtttatcaaatttttggcagggtgtagatggtaattcgtgaataaactaccttaacatatttttaaaattattatacagactgaacagttagaagttggaatgatttttccgaaaagaaaaaagacaccttttgatcaaaggtgtctgtgactgggctagctggattcgaaccaacgcatgacggagtcaaagtccgttgccttaccgcttggctatagcccaataatggtggaggggggcagattcgaactgccgaaccctgagggagcggatttacagtccgccgcgtttagccacttcgctacccctccacataaaattttgaaaaaacagtgccggcaagaggacttgaacccccaacctactgattacaagtcagttgctctaccaattgagctacaccggcaagatggtggaggatgacgggctcgaaccgccgaccctctgcttgtaaggcagatgctctcccagctgagctaatcctccaaatggtgacccgtacgggattcgaacccgtgttaccgccgtgaaagggcggtgtcttaaccgcttgaccaacgggccgttgtgttctcgtcgagctgacaaaagttattatatacaggtcaccccctgtttgtaaagaggaaaattaaattttttattttcaaactttttaactccttttttaactgaaaaagcctcccaactaaagccatttattttatgatagagacaagcaaagcaagagaggagaaaccaatatgattctagtcagttcttgccttggaggcattgaatgcagatataacggctctcacgcagcgtcggagaaaatcagaaaactagtcgatgaaaagaaagcagtcatggcttgccctgaacttctcggcggcttctctaccccacgcgaacccgcagaaatcataggaggcactggcgaggatgtcctcaatggaacagcgaaaatcgtgacagcttcaggagaagacgtcacagaactatatatggaaggcgccgcgaaaacattggcttacgcaaaagaaatcaacgcttctgccgtcatattaaaagaaaacagtccatcttgcggaagcggttttatctataacggcacattctctggcaaaaaaatcaccggcagcggagtaaccgccgcactgttaaaacaagcgggctaccgcgtcatttcggaaaacgagcttaacgacatattgtaaggaggccaccccatgactcaagacatttctttatccttctataagcctgaacacttgcccgagctccaatcattcacgctcaccaacgatgacaaacgctttacctccctcccgaaagaggtgctgtctcaggctctgggcatacaggaccgatacccggttgtcatcttaaaagacgaccttccagtcggttttttcattttacatgcatcaaaagaaacgcttgcttcctattctaacaatccatttgctttactgctcagctccctgtctttaaccgctgtgcatcacggaaaaggctatgcgaaaaaagccatgcttttgcttcccgcttttgtgagcggatattttccatggtgcgacgaaatcatcttggccgtcaatcatctgaacatacgcgcaaaacacctttatatgaaaagcgggttccttgataaaggacggcgaagaatcgggccgcttggagaacagttgatccttcatcatttcttatagtcttaagtgaaataaaatttcaaaaatttaaaaacatagttgaaatatcataacagaaatgaatatactgaatattgagatatatcattttaaaacagggggcatcctcatgtcagaaccattaaaccttcaccgtcttacaacggaatcacgcaatagtcaaacagttgaaatccacaaagcaaacactctcggcatccttaaaatgatcaacaacgaagatatgaaagtcgctgcagccgttcaggaggttctccccgacatcaaaacagctgtagactgcgcatatgaatcgtttcaaaatggaggccggctcatatatacaggcgccggcacaagcggcagactcggcgtcatggatgctgttgaatgtcctcccacctacagcgtaagcccagatcaggtcatcggaatcatggctggaggccccgaagcctttttacaggcagcagagggcattgaagacagtgaagaagcaggagctgaagatttaagaaacatacagctcacttcaaatgacaccgtcattgccatcgcagcaagcggccgcacaccctacgccgcaggcgccctaagatacgcccgtaaagtcggagcacacaccatcgcccttacttgcaatgaaaattccgccatcagcaaggatgcggatcacagcattgaggttgtcgtcggacctgaggccattacaggatcaacacgtatgaaagccgcaaccgctcataaaatgattctaaacatgatatctaccgctgtaatggtcaaaatcggcaaggtttacgaaaacttgatggtagacgtcaacgtcagcaacaaaaaactaaaagaacgcgccatcagcatcatccaaagccttacaaacgcttcatacgacacagccagatacactctggaacaagccgatcatcacgtcaaaacagcaatcgtcatgctcaaaacaagcacagatcagaaacaagcacagacattactcgatgaagcaaacggtttcattgacaaagcaatcgaacattaccatccatgataaggagagaactagaatggccacaggcggtttagcgatcatccaatcaatgaagcataagctccctccatccgagcgcaaacttgcagattatatcctagcccatccccacaaagcaatcgaaagcacggtcaacgaaatcagcgccttagccaattcaagtgacgctgccgtcatcaggctctgcaaatcactcggtttaaaaggatttcaagatttaaaaatgagagtagcaggcgatctggcaaagcctacgtttcagggctaccgggatattgttccccacgagccgctgccctccatttccgaaaaaacggccggcaatgccattcaagccattcaggatacttcagacctgatggactacaaagagcttgaacgagcggtttctctgcttctcaaagctcataccgtgcattttatcggcctcggggcttccggcattgtcgccaaggacgcccagcaaaagtggcttcgcattcataaacaagcaaccgcgtttacagacactcatcttgtggcatctttaatcgcaaatgcagataaagacgacatcgtattcgccatttcgttttcaggagagacacaggaaatcgttgaactgttcgccatggctaaggaaaaaggcatcacaacgatcagcctcacacaattcagtcagacatccgtctccgcactggctgatgtccctttgtatacagcccattccaatgaagccttgattcgaagtgcagccacttcttcccgcctcgcccagctttttataattgatgttttgtttttaggcatggcggctgagcagtatgaaacgacaaccggttatatagataaaacgagagcagccatacaatctatgagaataaaataaggcatcttgaaggggaggggttttaatgagcaaagaaaataactaccatcatctcgcacagaaaatccttgagctatgcggaggaaaatccaatatttcttcatatacgcattgcatgacacgcctgcgcattacgccttacgatgaaagcaaagcggatgctcaggctttaagaaagcttgacggcgtattgggggtcgttgaagctgaaaccttacaaattatcctcggcacaggagttgtcaatcatgttacagctgctttctcaaagctcgtgtcagcagaagaaggtgccgatgtcaaagaagcagcggccaaaaagaaagccgatatcaatcggaaaaatgccactccttttaaacttttcttacgtaaaattgccagcatttttatccctcttattcccgctctagtcgcttccggtttaattactgggattaccaaagcaattattcaagcaggctggctctctgcagactcacaaattgcgattatcctgacagtcatcggatcagggctgttcacttatctcggcattctcgtcggtattaacgcttcgaaagaatttggcgggacacccgcacttggggctttggccgggatcttgattatcaatccggagatcgcaaaaatcagtttatttggagaagagcttctcccgggcaggggaggtctgatcggcgtccttttcgcagccatattcattgcttacaccgaacaatttattcgccgttttattcctcaatcacttgatatcattgtcacacccaccgtttcactgttaatcaccggaatcgtaacgtatgtcgtatttatgcctttaggcggattcatttctgatgctattacatccggcctactgtccatcctggacatcggcggcatcgctgcgggctttattctgggcgcaaccttccttcctctcgtcgtaaccggactgcatcaaggcttgacgcctgtgcacatggaactgatcaattcaattggcaatgatcctctgctccctattttggctatgggaggtgcaggacaggtaggcgcggcctttgccgttttcgtgaagacgaaaaaaacaacactgaggaaagcaatcgccggcgggcttccatcgggactgctcggcattggtgaaccgcttattttcggagtcacgctgccgcttggccgtccgtttttaacagcatgtttaggagctggaatcggcggcgcctttcaagcttattttcaagtagccaccattgcgattggtgtctccggactgccgctatcttttctagtcctgccttcgcaaatcatcctgtatatcgttgggctctttatttcctacgcggccggttttttattgacctatgcattcggatataaagatgaaatggcttctcagttcgattaaattgtttctgttttagggatagtaaacgggatagaagcacagaaaggggctagcctgtgaaaacaaagacactgttcatattcagtgccattttaaccctatcgatatttgcgccaaatgaaaccttcgcacaaacagcaggcaacttgattgagccgaaaatcataaatgcagaaactgcacaattctcgacgaagaagctaaggaaggtagatcagatgatagaacgggatattgcagcaggatttccaggcgccgttcttgtggtggtgaaggatggacgcatcataaaaaaagcagcatacggctacagtaaaaagtacgaaggatcagaactgctgcgccgtccggccaaaatgaaaacccgcacgatgtttgacttagcctcaaatacaaaaatgtacgcaacaaattttgcattgcagcgcttagtcagccaaggaaaacttgacgtctatgaaaaagtttctgcatatttgccgggtttcaaggatcagccgggtgacctcataaaaggaaaagacaagatacgtgtcattgatgtcctccagcaccaatcagggctcccatcaagcttttacttttacacgccggaaaaagccggcaagtactattcccaagaacgggacaaaacgattgaatatttgacgaaaattccgctcgattatcaaaccgggacaaaacacgtatacagtgacattggatatatgctactcggatgtattgtcgaaaaactcaccggcaaaccgcttgatgtctacacggagcaagagctctacaaaccgctcaggctgaagcataccttgtacaatccgctgcaaaagggctttaaaccgaaacagttcgcagctactgaacgcatgggcaatacacgtgacggcgttattcaattccctaacatccgcacaaacacgctgcaaggagaggtgcatgacgaaaaagcgttttactcaatggacggcgtgtctgggcatgccggattgttctcaaatgcagatgatatggccatactgctgcaagtcatgttaaacaaaggttcataccgaaacatttctttatttgatcagaaaacagccgacctgtttacagcaccttcagcaacagatccgacattcgctcttggctggaggcggaacggaagtaaaagcatggaatggatgtttggccctcatgccagcgaaaatgcttacgggcataccggctggacggggacagttacaattattgatccagcatacaatttaggcatcgcattgttaacaaataaaaagcatacaccagttattgatccggaagaaaatccgaacgtctttgaaggtgaccaatttccaacaggcagttatggaagtgtcataaccgcgatttatgaagcgatggagtgaatgattagacgataggaggaagtttctatgagacctgtctttccgcttatcctttcagccgttctctttctttcatgctttttcggggccagacagacagaagcctctgcatccaaacgtgcaatcgatgccaatcagattgtcaatcgtatgtcgttagatgaaaaactcggccagatgctgatgcctgattttagaaattggcaaaaggaaggcgagtcctctccgcaagcccttacaaaaatgaatgatgaagtcgccagcctcgtcaagaaatatcaattcggaggcatcatcctttttgcagaaaatgtaaaaacaacaaaacaaactgtccaactgacagacgattaccaaaaggcaagtccaaaaatcccgctcatgctgagtattgatcaggaaggcggcattgtaacgaggttaggggagggcactaatttcccagggaatatggcgctgggcgcagccagaagcagaatcaatgcgtatcagaccggcagcatcatcggaaaagagctctctgccttaggcatcaatacagatttcagccctgtcgtggacattaacaataatcctgataatcctgtaatcggcgtacggtcattcagctccaatcgagaactgacatcacgcctcggtttatatacgatgaaagggttgcagcggcaggatatcgcgtctgccctcaaacatttcccgggacatggagacacggacgttgacagccattatggactgccgctcgtttcccatggccaagaacggcttcgtgaggtcgagctttatccttttcaaaaagcaattgatgctggtgctgatatggtgatgacagcccatgttcagtttcccgcctttgatgacaccacttacaaaagcaaactcgatggatcggacattctggttccagctacactttcaaaaaaagtgatgacaggtcttcttcgtcaggaaatgggctttaatggggtcatcgttaccgatgcgctcaatatgaaggcaatcgcagatcatttcggacaggaagaggctgtggtcatggccgtaaaagctggtgtcgatattgcattaatgccagcctcagtcacttcattgaaagaagaacagaaattcgcacgtgttattcaagctttgaaagaagccgtgaaaaacggggatattcctgaacaacaaatcaacaattcagttgaaagaatcatttccctgaaaataaaacgcggcatgtatccagcgcgaaacagcgacagtacaaaagaaaaaatagccaaagccaaaaaaatcgtaggaagcaagcagcacctgaaagcagagaaaaaattagctgaaaaagcagtaactgtattaaaaaatgaacagcacactttgccgttcaagcctaaaaaaggcagccgaatcttaattgtggcaccttacgaagaacaaactgcttcaatcgaacaaaccattcacgatctcatcaagcgaaagaaaatcaaacccgtatccctcagcaaaatgaactttgccagccaagtatttaagaccgagcatgaaaaacaagtaaaagaggctgattatatcattaccggctcctatgtcgtcaaaaatgaccctgtcgtcaacgacggtgtcatcgacgacacaatatcagattcaagcaaatgggccaccgtgtttccgagagctgtcatgaaagccgcactgcagcacaacaaaccatttgtcttaatgagcctgcgcaacccctatgacgcagccaatttcgaagaagcaaaagcactgattgcagtctatggctttaaaggatacgcaaatggccgttatcttcaacctaatattccggccggagtgatggcgatattcggccaggcaaaacctaaaggcacacttccagttgacattccgtcagtcacgaaaccagggaacaccctttacccacttggctacggattaaatatcaaaacgggaagaccgctttaataaggagggacacatgagaaaaacaatattcgcttttctgacagggctcatgatgttcggaacgataaccgctgcctctgcttcacccgattcaaagaatcaaacagctaaaaaacctaaagtccagactgggatagacacgctcttgccagactataaaaaacagctcaagggaaaacgcatcggactgatcaccaatccagccggagtaaacacatctctaaaaagcagtgtcgatatcctttacgagaacccggatatcaaactgacagctttattcggccctgaacacggcgtccgcggtgacgcccaggctggagacgaagtaggctcttacattgacgaaaaaaccggggttcccgtatacagcctctacggaaaaacgaaaaaaccgactccagaaatgcttaaaaatgtcgatattctaatgtttgacattcaggatgtcgggacccgtttctacacgtacatttatacaatggcatacgcaatggaagccgctaaagaaaacggcattccatttatggtgctggaccgtccgaatcctcaaggcgggaatcatattgaaggaccaatcttagaacctgaatacgcctcatttgtcggattgtatcccattccattgaagcatgggatgacgataggcgaattggcttcactgttcaacaaagaatttagtattgatgccgatcttacagtggtaaaaatgaaacactggaaacgaaaaatggattttgacgatacccgattgcctttcgtcctcccttcgcctaacatgccgacggtggaaagcacatttgtttatcctgcaaccgggctgattgaaggaacaaatatatccgaagggcgagggacaacaaagccattcgaattgatcggagctccctttatcaaaagcacagaacttgaagaaacattaaacagcctccatttgccgggcgttacatttagggcagcatccttcacaccgacgttttctaaacatcaaggaacgctttgccacggtgtgcagctctatgtgacagacagagataagtttgaagccgttaaaacgggtctttcagtcattaaaaccatacacgatctctatcctgaggattttgagttcctgtcaacaggttcattcgataaactggcaggcaacggctggatcaggacaaaaattgaaaatggaacttcggttgagaacatcataaacagctatgaaaaaacactccaacaattcagcaaaacaagaaaaaagtatctcatttattagaacataagcatcgtatgttacacgtgtaacatattcttattgaacgaaagacccttacttttacacataagtaagggtttttttcatgctaaaaacccacccgctttatataggaaaactttcatttatttggtacaatttttattgaaaatgattatcaattgaaagcttctgaaaaggtggtctactcgtgcaaaatgcagtgatttatcaaccagtacaaattgaatatctaaaaaagacaagtgatctcttctcagaacagcaattagccgattcattcgtgctgatttttcatttaaaaggaaacggctatatttcgatcggaacaaacaccaatcctctgcaaaaaaagacactttatgtttgtccgcctaacgagacctttggctttacgccagcagccgatggacatatagatgcctgtataatcaggcttctaagctatatcaaggaaaccgggcaagatattttcacaccgtgcacagaatcggaattagccaaactgaagcttatgaatgtttcacatatcgaaaatcttgcagtccggcttcaagagcttgccgcactatggaatgaatcgtctcagctttctcagctaaaatgtgtgattgaagtacaaagcctgatttatgatctttttactgccagtttatctgatcaaacggatacacattcagcaatcgaaaaaacaaaacactatatcgaaacccatgccgatacaaaaatcacgcttgcccagctgtcgcaaatggcaggaatcagtgccaaacactacagtgaaagctttaaaaaatggacaggacagagcgtaacagaatttattacgaaaacacgaatcacaaaggcaaaacggctcatggcaaaatcaaactgcaaattgaaagaaatcgcacaccaaaccggttatcaagatgaattttatttcagcagaatctttaaaaaatatacaggctgttcacctacaagctatatgaaaaaacgccgaaagaaaatcgccgcatacggaaggggcacaatgggccatctcatccctcttcaccacataccttttgcggccgctctgcatccgaaatggacgtcttactactatcagcattattcgacagatatacccgtccagctcagtgcataccggtttaatgaaaagtgggaagaaaacctgtacacgttatcacaggcagaaccagatgtgattgtcagcatggattctatttctccagaagaacaagatcgcctgaatcgcatcgcagaagtcatgtaccttccttcagaagaaagctggagaacccactttctgcaaactgcctcatttttaaaggaggagtccgaagcagaaaagtggctagcggattatgaccagcagacaacggccgccaaaaaaacacttcagcacgttcaagggctgcgttttctctttttgaggctgcataagcaaaacttctatctggctcataaccgaagtgtccgcgaagttttctttggggatttaggattcagctcggcaacaacggctgacacaccttcagaacaagcgatttcgttagaaaatatcgcaaattaccaagctgactgtatgatgctttttctttttaaagagccggagaccatagcttactaccagcaattacagcagacagaagcatggcaaaacctaagcgcggtacgagataaccgtgtttatcttctatcccttgacccgtggaatgaatactcagcttgcgggcacgaacgcatcgttcagcaaactgtttctttactatccggagattgtccatgataaatcaggaatttgtccatggtgttatatctgttcattctctataattccaattgataatagttatcaattgaacaggaggctctatagatgaaaaagatatctcttaccttattaatcttacttctcgcgctgacggcggcagcttgcggcagcaaaaatgaatcaactgccagcaaggcaagcggcacagcatctgagaagaagaaaattgaataccttgataaaacatatgaagtaactgtaccgacagacaaaattgccattacgggaagcgttgaatcaatggaagacgcgaaattgcttgacgttcatccgcaaggcgcaatttcattctccggcaaattccctgatatgttcaaagacatcactgataaagccgaaccaaccggagaaaaaatggagccaaatattgaaaagattcttgaaatgaagccagatgttatccttgcttcaacaaagtttccggaaaaaacgctgcaaaaaatcagcacagcaggcacgacgatcccagtttctcatatctcttcaaactggaaggaaaacatgatgcttcttgcccagctgactggaaaagagaaaaaagcaaagaaaattattgcagactatgaacaggatctaaaagaaataaaaacaaaaatcaacgataaagcgaaagattcaaaagcgcttgtcatcagaatcagacaaggcaacatttacatttaccctgaacaggtgtatttcaactccacactatacggtgatttaggccttaaggcgccgaacgaagtaaaggctgcaaaagcgcaagagctgagttcattagaaaaattaagtgaaatgaacccggaccatattttcgtccaattttctgatgatgaaaatgcagacaaacctgatgccttaaaagatttagagaaaaatccaatctggaaaagccttaaagcagtcaaagaagaccatgtgtatgtcaactcagtggaccctctcgcacaaggcggcacagcttggagcaaagtccgtttcctgaaagcggctgctgaaaaattgacacaaaactaattcagagtaggtttttgtatgtattcaaaacagtggacacgtatcatattgattacttctccatttgctatagcgctgtcacttttgctttcaatcctttatggggcaaagcatctcagcacagatattgtttttacatctcttattcatttcgatccgggaaacacagaccatcaaattatatggcattcccggattccaagggctgccggcgctctgctcataggggcagcccttgctgtttctggagcgcttatgcagggcattacgcgcaattatttagcttcgccatccattatgggtgtttcagatggttcagcgtttatcattacgctttgcatggttctgctcccgcaatcatcttcgattgaaatgatgatatactcttttatcggctcagcgttaggagcggtgttagtattcggccttgccgccatgatgccaaacggatttacccccgtgcagctcgccatcatcggcacagtcacaagcatgctgctcagcagcttatcagcggccatgtcgatttattttcaaatttctcaggatctcagtttctggtacagtgccagacttcatcaaatgagtccagatttcctgaagcttgccgctccgtttttcctgattggcattataatggccatttctctcagcaaaaaggtaaccgctgtatcattaggggacgacatttctaaaagcctggggcaaaagaaaaaaaccattaaaatcatggcgatgctttccgtcatcattctaaccggcagtgccgtagcgctggccggaaaaattgcgtttgtcgggttggttgttccgcatatcacgagatttctcgtcggctctgattacagcaggctgattccgtgttcctgtattttgggcggaatctttttaaccctgtgtgatctcgcaagcagatttatcaactatccgtttgaaacaccgattgaggtcgtaacatccattatcggcgtacctttcttcctttatttaattaaacgaaaaggaggggagcaaaatggctaaaaaatatgcattgttcatcgctttgattcttgttgtcagctatttcagcttaacgagcggatcattttctgttcgtcctgctgagctgctctccactctttttcaaatcgacccgaatccgcagtatgaaattttgctgttcgatttaagactgccgcgggttgtcatggctgctattattggactcggtcttggcattgcaggcgctgttatccaggccatcacgagaaacgggcttgctgaccctggaattctcggaatcaacgcaggggcaggagctggcattgtagcgtttatgctcttattccaaggccagaaggaagtgacatccatagctgcagcgatgggaatgccgctctttggattgataggcgggctcatcgcggcgatcctgatttacatatttgcatggcacagaggcaatttagattcaggaagaattattttggtagggattgcgatcaattcaggattcagcgccctgtctttgtttttatctttaaaaatggacccgcaagactatcaaatggccatggtgtggaaaaacggaagcatctggtctgccaactggacgtatattacagctgtactcccatggatgctgctgtttataccgattcttatcggcaaatcccgcctgctcgacaccattcgttttgatgaagacacagtcagaagcctcggtatttcatcaaataaagaaaaaaccatccttctcgttgcctgtgtagcaatcatcagcgcctgtgtctccgtagcgggaagtatggcgtttgtcggcttaattgctccccatatctcacggagactggctggcgtcgaacatcgctatatcctgccactgagcggtttaatcgggatgcttcttgtgataagcgcagactttgccggaaaactgttttttcagcccgcagaagtgcccgcaggcatcattttggcgatcctcggagttccttatttcttatatctgcttttcaagcaaaaaaagggggagaatgcttgaaaggatctctttcagaacacaaagccggcaacaggaggttcacgctgtacctccctccttcctacagcacagacagcgggggatttcctgctgtttacgtgcaggatggcagttctttgttccaaaaccaaatcgaattactagaaagcgcctttcaacagcaaaggctccctgaactcgtgctgatcggtatcgaacccgaaaaccggcttgatgaatacaccccatggccggctgcatcactcagtgatcggttcacggacttcggcggaatgggatatcactatctgtctgatataacgaaccagttcattccgctaatcgaagaaaactggaacgtcaccagggaaccgcagtcaagaggaatgatcggtgcctcattaggcggcctcatctcaatgttcgccatattaaaatatccgtcaatgttcgggaaaataggctctatatcaggttcatactggtacgagaacgcagcggaaaccattcatatatcttctttaaagcccggcactgcacgtgttttcatgtctatcgggagtgaagaaggccgtgaaaaacaatccattcagcgacatatgctgaaaaaaacaaagcaagttcatcaaagtctaaaagaaaaaggcttcactgaagaccagttgtgtctttcaattgaaaaaggagcggtgcaccaccacaagtatttctgcaaacagttcatcaacgcgctcgaatggctatacggaaaaaaccgctcaaccctatgagcggtttttttatgccttctgcaacattggttttaattcaaaacgattcagcatatagccaaacaaagcagccaatatctgctgaaacagcatgccgatcacaacaggaacggcaacctgagacgggaagaacgtaacggcaagaactgcgccggcactaatattcctcatgcctcccgtaaatataagagagactatttcctcttgccgccttttcatcatttttccgatcagccaagcagcggcataacctgttaacgcgataaagaataccgttacagctattcctgcaaatctcaaatcaatggatttgaaataaggagcaatcgctgaactgttaatcgcaatcactgccatcaagcaaagctttgaaaaaggcgacagcgcactgctcacaaacgcagttctttctggagatgacatctgattaaacagcatgcccaaaaaagaaggaatcacgaccattacaatcagacctttcatcattccccacacatccatgtgaacctgagcgccggccagcaatgaaagactcagcggtacgattagcggtgacagcacagtatcaactaaaataatcgaaagtgtcaaaccgacattccctttgtacatcgctgcccaaatcaagcttgtaatccccgtaggaatcacaacagccaatgttaaaccggtaatcgtcaaaggatcacctttaaatataagatggccgctgccccaagcaaaaagcggcatgaaaatatgaagaacgaatagtgcaagaatcatagggagaggatgagacaatgcatgtctcaaagattgaaagttcgcgctcaaactgcctgcaaacgtaataaaagcaaagatccaaggcacagcccattcatacccatttaaaaactgagacagcagcacgcccagcaccacactagtcggcgttaacagcggcatcactctccccaatacacggttcagcttctgaagcatcatatgcaagtcccctatttaaaatttctcttctctctattatatcaatgctgcttaagtgtatgttatataaaaaagcccagatctcattcatctgggcttctctattttatgccatctgtttcattagagatttactcgctttattcaaaccttttaactcagcttcaatgccttgttccttaaacttcgcaacaatcttatcaagtgcggccgcaccagaatcgtcccatacgtgagcttcagttaagtcaatcacaacccgctcaatatcctcttgatatataaacgcattcgtaagatcagtcactgacgcaaaaaagatttgccccttcacttgatacgttctaagcttttgatcctctgcatgagaaacgattttcagcttcgagatttttgctacaaagaacacggcacttaaaagaacaccgacaaatacacccttagataagtcatccgtcacaacaaccgtaaccacagtcacaaccatgacaatcgagtccgtgagcggcgcttttttgagaccttttaaagaagaccaatcaaaagtgccgacagacaccataaccattacagctactaacgccgccattgggattttcaccacgacatgacttaacaccgcaattaaaaacatcagaaaagcaccggcaacaaatgctgacaaacgtccgcgaccgcccgcttttgtattaatgacagattgtccgatcatagcgcagcctgccattccgccaaagaatccagtcacgatattcgcaattccctgtccgcggctctctttatttttatcactatccgtatccgtcatttcatcaataatctgtgctgtcagcaaagattcaagcaacccgacaaacgctaaagcaattgaataaggaaaaataatttgcagtgtttcaaaggtaaacggaacatcagggattaagaaatgaggcaatgaactagaaatattgcccatatcaccaaccgtccgcacatccacatggaaagtgaccgcaataattgtcatcacaataatcgccacaagcggagacggaacagcagtcgtaaaccttggcagcacataaataataaccaacgacccggcaagcatcgcatacatgctccaagaagcaccttcaaactggggaagctgcgcagagaagataaggatcgccagcgcattcacaaacccgatcatcacagaacgcgggatgaatttcattaatcttgcaattttactgatacctaaaatcacctgaataatgcctgtcaaaatcgtagccgcaaataaatactgaagcccatgatcagcaaccagcgacaccataacgactgccattgagcctgtcgcagctgaaatcatgccaggtctgccaccaaaaatagaaataataatggctatgcaaaatgacgcataaagaccgaccatcggatccacaccggctataatagaaaagccaatcgcttcaggtattaacgctaacgcaactaaaatgccagcaagaatgtcttttcggatattcccgaaccattgctgttttaatgtaaaactattattcaaatataacgactcctttttagtaaaaaataaatccgcaccatatctattgtattgggagctttttttattttacgggagaaaatgaaaagaaaaacgaccggagaaaacggggaaacgttgagtatattgtattgaggcaaggagttgtcatacaaagagtatcataataaatttttatcaattacgcaagatgattgctgaagaaaaaaatggctcaaatatagtctgagacattttatcatatccggatgaaaccaagaatcgttttaatgacagtaatatcttttctctcatttggcaacccgagctggtttccgaaaaaataacctatcatcattatctcaggctgataaatatgagcggcctcatttaactctgtattttggcaatcaataaaacagcttttgcagggattattcttagttttttcttaggacttatttatggccggcatgttcgccattattttattgtcaccaatcaattttatcatggaaaaacagaacaaacgacaagcatgctgttcgctgccaatggattggcggctctatcctgccaatcgcagtcggatggagtctggatgagtctcccgtacaaactgcattttgattatttatgactctcatgttgatcatgctagggattgtattggaattcaaaagtattagaaaactttaaaaagcagaagcttgataaaatggatactgacgaaagcaaatcggcacagatataaaacaaaaaacccagctcaacctccgccatcagttacaccatcaagcgcatggaaaccgggctggacgtggtgctgtttgtgcgtaacacgcgcagcattgagctgaccgagtccgggttctacttttaccgcaaagccaccgacctgcttaacgatttccacgccatcaagcgcgggattgataccatttcacagggcatcgaggcgcgggtgcgcatctgtatcaaccagctgttatatacgccgcgccataccgcgcggctgctccaggtgctgaaaaagcagtttccgacctgccagatcaccgtcaccacggaggtctataacggcgtgtgggattcgatcatcaataaccaggccaatatcgccattggcgcaccggacacgctgctcgacggcggcggaattgactacaccgagatcggcgccatccgctgggtgtttgccattgcgccggcgcatccgctggcgttcgttccggaaccgatagcggagagccagctgcgcctgtatcccaacatcatggtggaagataccgcacacaccattaacaagaaggtgggctggctgctgcacggtcagggggcgattctggtgccggactttaataccaaatgccagtgtcagatcctgggcgaagggataggttttttaccggagtatatggcgcgggacgcggtggaagacgggctgctggtgacgcgacgtatcaataacccgcgtcaggactcgcgcatgctgctcgccacgcagcatgccgcgacaggccaggtcacgcgctggatcaaacagcagtttggtccagcgggggtgctgaccgatatctatagcgatttactgtggcgcgcttagcttttgctctgtacccaaaatgcgtgaatgaggccggggaagtagcccagcagcgtcagaagaatgttgatgataaacgcccagccaagccctttgcccaacagcacgcccagcggcggcagcaggatggtaaaaacaatacgccaaaaacccatattaacactccgtgcaagctaatccattgaaaataatagagagaaccagttctaagcatagccagtttacctgtctgcgccagttccctgctccgcgtttaccctcttttacgcttttgacgctggcgtaatgcgcacaattactttagcattaccttaattaagaaaactctaaagtactatgactgaactcgaacagcttcaggccagcgcagagcaggccgcaacgcttttaaaagcgatgagcaacccgcgtcggctgctgatcctctgcacgctgtgcggcgcccccggcaccagcgcgggggagctggcccgcgcgacgggcctgagtccttccgccacgtcgcagcatctggcgcgcatgcgtgaggaaggcctgatcgccagcacccgcgaggcgcagcgcattctctatttcattaaaaacgacgcggtgcatcagcttatcagcaccctgaaaaccctttattgcccgtaaggagccgccatgtcacttccccttctttcgccgcgcgaggccaatgcccgcatcgccgatggcgcaaaactgattgatattcgtgatgccgacgagtacgcccgcgagcatattcccgccgcgcagtccgtgccgctggataccttacccggcggacttaaaacgcaggcgggcgaaacggtgatttttcactgccagtctggcgcccgcacctcaggcaatgccgatcgccttgcgcaggctgccgcccccgctcaggcatttgtggtcgaaggaggcattcagggctggaagcaggcgggtctgcagacagtcgaagacaaaacccagccgctgccgctgatgcgtcaggtgcaaatcgctgccgggctgctcattctctgcggcgtagtgctgggctatagcgtctcagacggctttttcctgctcagcggcttcgtgggggccgggctgctgttcgccggtgtaaccggtttttgcggcatggcgcggctgctgaaggtgatgccctggaaccggcgtacctcataagcagtaatcggtgaaatacgctgtacccggtgtcatacgtgggctaaggtgaagatcgctaaaacgatgaggaggtaatatgttttctgtcggtgattatgtacaaccgcgtaaaggcggcccgaagctgaaagtgctcgaagtgaacggtgaaagcgtggtggcggtacaggccagcaatgaacaaggcgagaaatataccctgaaagccgccgagctggcgccgtataccgaagacggtgatttcggcgtctgctgaaaagagtgccgggcggtatgttccgcccggttcacgcattagatcagaaaatcatccagtgatttcccctctgccagcgcgctggcaataggcttcggcgtacggccctggccggtccacgttttctcttcaccgttctggtcaataaaacggtatttcgcttcacgcggcttacgctttttcgtggatttacccgtctgcgccagttcagagcccagcagatcggtcggtgaaataccatcggctttcatccgttccagcagagcattaattttctcctgctgctcggctctctgctgctctaattccgccagctcactacgtttctcttcagcaacgaccctgactttttccagcatttcctcaagaacgtccagggataattcgcgtgccatggcgcgcagagttcggatattattaagattctgtaacgtcaaagacatattattttaaaaccttttgtttagggtaaatagataaatcaccgacagaataattcatttccgctgaaatatctacccgcaggctggccctgccatagcgtaaatatgtttaactgtcgccgttaatattatcttataacgtctgagcgatacgcagggattcaatcatcactgcaatataaagggtcaaccttaatcaaaatttcagcattctgcgctacccacaaaagcactgactcacctttcaacatcaagatagttaagctaatgatttaaaaacaaaaaccatcgcacgagacagattataacgaagcgaacaaaaaaccatcaattttagagaattttgtggacaaaacgcgcttaaataaaaattaatcactagttgttagttcaaacgtagagatatacgctatacacgtcaaacaaaccaacctaaagcactaaccgcttcgggaaaatcgtttcttttgtgttcttctcaaggagttcagacatgttctcaccgcaatcacgccttcgccatgctgtggcggatactttcgcgatggttgtctactgttccgttgtgaacatgttgatcgaaatattcctctccggaatgtccttcgagcagtcactttcttctcgtctggtggcgattccggtcaatattattattgcctggccttacggtttataccgcgatgccgtcatgcgcttcgcgcggcgtatcagccccgctggctgggtgaaaaacctggcagacgttctggcctatgtgacgttccagtcgccggtttacgtggccattctgttgacggtgggcgcggactggcaccagatcgcggcggcggtcagttcgaatattgtgatttcaatgctgatgggggcggtgtatggctatttcctcgactactgtcgccgcctgtttaaggtcagccagtacagccaggctaaagcgtgatgtgaagcgactggcgcaggccagtcgcaaatttactgtacgtcgccaaacagtcccttcaaaaaccgttccagcgccatacgcgagctgaaaccatgcggaataccgtaatgctcatgcgtctctccgcctaaatagagcggaaattgctgataatgatcgcaggttttaatatccgaggcaggctcagcaaatgacagacttctgtctttcaacgtcgggtgaataatgagagcggtacgtcccattcttgcttcacgattaacgtaaacataattctcgccacggcgatatccatacgcttttggcgtcacctcatccatggtgaatccctctttttcaagaacgcgtgccacctcgtcaggtcgtaaatacatattttttcctcgttatcttttcctgcccggcaaccttacagtattcagcattagcagggctttcagaatagtccataaactggcggatatcgcgtgatgcgcttcagatattaaatttctgaactaaactgaacgggaacacaaaattacggaggatcgtatgtttaacagaccgaaccgaaacgatattaacgacgacgctcaggatattcgtaatgatgtcagccaattagcagacacgctggaagaggtgctgaaatcctggggaagtgacgcgaaggacgaagcggatgccgcaaaacgtaaggctcagtctctgctccgtgaaacccgcgcacgcctaaatggccgcacgcgtaccacacaggctgcctgcgatgccgtcagctgcgcaacgaccttcgtgcgcgaaaaaccgctctgcacgctcggcacggtagcggcagtcgggatcttcgtcggcgctctgcttagcctgcgtaagtaagcgcgagccattagccccagtcgccgctggcgccggggctttttaatgcccgcaagcctgaaaaacccgtacaacaccccctgccccgctgtgctcatcatcagggcatcatcaatctaaatttcccatatcttgtatggttgaaacttaagacaactacatctagtattccttttagcaagatacacacaacctgacgcgatgattcgcgccgccctctcattttaaatggaaatacgaatcatgagcattattatttacactcgtaacgattgtgttcagtgccacgcgaccaaacgggcgatggaaagccgcggcgtggcgtttgagatggtgaatattgaccagcagcccgaggccgccgatacccttcgcgcgcagggtttccgtcagcttccggtggtggtggccggggagaccagctggtctggcttccgtccggacatgatcaaccgcatcgccgcgcaggccgcacgggcatgagtgggctggtcttcttctccagcagctcggaaaacacgctccgttttatggcgcgcgtcgggctgcctgcggtgcgcattccccttaacgagcgggagcgcatccgggtagaagaaccgtacattctggtggtgcccagctacggcggcggcggtacggcgggcgcagtgcctcgtcaggtgatccgctttctgaacgatccgcataaccgcgggctaatccgaggcgtgatcgcggcgggcaatcgcaatttcggcgatgcctttggccgcgccggagatgtcatctctcaaaaatgcggcgtgccgtatctctatcgctttgagctgatggggacgcagcaggacgtcgaaaacgtgcgtaaaggagtgaacgaattttggcaacgacaaccgcagaacgggtaatacaggcgacgccggattaccacgcattaaacgcgatgcttaacctctatgaccgggagggacgcattcagtttgataaagaccgtgaggcggtggacgccttttttgccgcccacgtgcgacccaacagcgtgaccttcgcgagccaggatgaacgtctcgaccacctggttaacgaaggttactacgatgcccgcgtcctcacccgctacgcacgcgccttcgtcgtgaagctgtttgaacgcgcccacgccagcggctttcgtttccagacgttccttggcgcgtggaagttctacaccagctacaccctgaagaccttcgacggtaagcgctacttagaaagctttgaagatcgcgtggtgatggtcgcgctgaccctggcgcagggcgatgaagcgctggcgcaacagctcaccgacgagatcctctccggccgcttccagcccgccacgccgacctttctcaactgcggcaaagcccagcgcggcgagctggtctcctgcttcctgctgcgcattgaagataatatggagtcgataggccgcgcggtgaactcggcgctgcagctctccaaacgcggcggcggcgtggcgtttctgctctcgaacctgcgtgaagcgggcgcgccgattaagcgcatcgaaaaccagtcctccggcgtgatcccggtcatgaagatgctggaagatgccttctcctacgccaaccagcttggcgcgcgtcagggcgcgggcgcggtttatctgcacgcgcaccaccccgacattctgcgtttcctcgataccaagcgcgaaaacgccgacgaaaaaatccgcatcaaaaccctgtcgctgggcgtggtgatcccggatatcacctttaagctggctaaagagaatgccgacatggcgctcttctcgccgtatgacattgagcggatttatggcaaagcctttgccgacgtggcgataagcgagctgtacgacgagctgctggccgacgatcgcatccgcaaaaaaaccatcaacgcccgcgatttctttcagacgcttgccgaaattcagtttgagtccggctatccgtacattatgtacgaggacacggtgaaccgcgcaaacccgattgccgggcgcatcaacatgagcaacctgtgctcggagattttgcaggtcaacagcgcctcccgctatgacgagaatctggactacgcggagatcggcaaagacatctcctgcaacctcgggtcgctgaatatcgcccacaccatggattcccccgactttggccgcacgatagaaaccgccattcgcgggctgacggcggtgtccgacatgagccacatccgcagcgtgccgtccatcgaggcgggcaacgccgcgtcgcacgccattggcctcgggcagatgaacctgcacggctacctggcgcgggaaggcatcgcctacggcagcccggaagggctggacttcaccaacctctatttttacaccatcacctggcacgcgctgcatacctcgatgatgctggcgcgcgagcgcaaccagcgtttctcgggctttgaacagtcgcgctacgccagcggagagtatttcagccagtatctggaaggcgactggcagccgaaaacggcgcgagtaagggagctgtttgcccgcgccgggatcgttctgcccacgcgcgcgatgtggcagcagttgcgtgatgacgtgatgcgctacggcatctacaaccagaacctgcaggccgtaccgccaaccggctctatctcctacatcaatcacgccacgtcgagcattcacccgatcgtgtcgaagattgaaattcgtaaagaaggcaaaaccggacgcgtttactaccctgccccgtttatgaccaacgagaacctggctttgtaccaggacgcgtatgagatcggcccggaaaaaatcatcgatacctacgccgaggcgacgaaacacgtggatcagggactctcgcttacgctgttcttcccggataccgccaccacgcgggacatcaacaaagcgcagatctacgcctggaagaaaggtatcaagacgctctactacattcgcctgcgccagcttgcgctggaaggcaccgaaatcgaaggctgcgtgtcctgcgcgctgtaaggagaaaggatgaaactgtcacgcgtgagcgccgttaactggaacaagatccaggacgagaaagatctggaagtgtggaaccgcctgaccagcaacttctggctgccggaaaaggtcccgctctccaacgatattccggcctggcaaaccctgagccacaccgagcagcagctaacgatccgcgtctttaccggcctgacgctgctggacaccattcagaataccgttggcgcaccggctctgatgggtgacgcgctgacgccgcacgaagaggcggtgatgtcgaacatcagctttatggaggcggtgcacgcccgctcctacagctcgattttctccacgctgtgccagaccaaagacgtggacgcggcctacacctggagcgaagcgagcgagtcgttacaaagaaaggcggagctggtactggcgtattatcgggccgacgagccgctgaagaagaagatcgccagcgtgtttctggaatcattcctcttctattctggcttctggctgcccatgtactggtcgagccgcggcaagctgaccaacaccgccgatttgatccggcttatcattcgggatgaagcggtacacgggtattacattggctataaatatcagaaagggctcgagaaaatcagcgaggcgaagcgtgaagagctcaaagggtttgcgctcgatttgctgatggatctgtacgacaacgagctgagctataccgaggaactgtacgccggcaccggctgggaggaggacgtgaaagccttcctctgctacaacgccaacaaggcgctgatgaatctcggctacgacgcgctgttcccgccagagatggcggaggttaacccggcgattctctccgcgctgtcgcccaacgccgacgaaaaccacgatttcttctccggctcgggttcgtcgtacgtgatgggcaaagcggtggaaaccgaggatgaggactgggatttttaatgaacgttaacgttcgttaatttaatataaacccaacaatttcctctccaatatttacaaaacaactacactgtcatttccgcgccctattcgcctgaatcacccgattcaggcgaaattccccgatgccgcagcaaaaaattgagaaaaattcaaatcccgctcagccctttactcatggggaattcagccgtttcgcctccctgaaaatttacgtcataagcaaacccagggttgtctcagattctcagtatgttagggttatgcccgttaacaatttaccatggtaatcatatcgacataaacaaataacaggacactctctattgcatggcaattaaattagaagtgaaaaatctttataaagtatttggcgagcatcctcagcgcgcattcaaatatattgagaaaggcctttcgaaagagcaaattctggaaaaaaccgggctatcgcttggcgttaaagacgccagtctggccattgaagaaggcgagatttttgtcatcatgggattatccggttcgggtaaatccactatggttcgccttctcaatcgcctgattgaacccacccgcggacaggtgctgattgacggcgtggatatcgccagaatatcagacgccgagcttcgcgaggtgcgcagaaagaagattgcgatggtattccagtcattcgcgctgatgccacatatgacggtcctggataataccgctttcggcatggaattagccggtacacccgcgcaggaacgtcaggaaaaagcccttgatgccctgcgtcaggttgggctggaaaattatgcgcatgcgtacccggatgaactttccggcggcatgcgtcagcgcgtgggattagcccgcgcattagccattaatccagacattttattaatggacgaagccttctctgccctcgatccgttaattcgcaccgagatgcaggatgagctggtaaaattacaggcgaaacatcagcggaccattgtctttatttcccacgatttggatgaagccatgcgtattggcgaccgtattgccattatgcaaaatggtgaagtggtacaggtcggcacgccggatgaaattctcaataatccggcaaatgattatgtgcgcaccttcttccgcggcgtggatattagccaggtctttagcgccaaagatattgcccgtcgaacgccaaacggcattatccgtaaaacgcctggcttcggcccgcgctccgcgctgaagctcctgcaggacgaagaccgtgaatatggttatctggttgaacgcggcaataaatttgttggcgttgtctccatcgattctctgaaaaccgcgctcagcgaaaaccagggcatcgatgcggcgttaattgacgctccgcttgccgtggacgccgaaacgccgctcagcgagttgctctctcacgtggggcaggcgccttgcgccgtaccggtcgtgggtgaggaacaacagtacgtcggcatcatctccaaacggatgctgctgcaggctttagatcgcgagggggcaaataatggctgatcaaactaacccgtggggcaccactgaagcggcggacagcgctgcgcaatccgccgacgcgtggggttccacgccagcacccgccgacggtggcggtgcggcggactggctgaacagcgcccccgcgcctgcgccagagcacttcaatattatggatccgttccacaagacgctgatcccgctggacagctgggtcacggaggggatcgactgggtggtcacgcacttccgcccggttttccaggggatccgcatcccggtggattacatcctgaacggcttccagcagctgatgctgggcatgccggccccggtggcgattatcctgttctccctgatcgcctggcagtttggcagcgccgggatgggtgtcgccacgctgatttcgctgattgccatcggcgcgattggggcctggtcgcaggcgatgatcaccctggcgctggtgctgaccgccctgctcttctgcatcgtcatcggcctgccgatggggatctggctggcgcgcagcccgcgggccgcgaagattattcgcccgctgctggatgcaatgcagaccaccccggcgttcgtctatctggtgccgattgtcatgctgttcggcatcggcaacgtgccgggcgtggtggtcaccattatctttgccctgccgccgattattcgtctgaccattctcgggatcaatcaggtgcctgcggacctgatcgaagcgtcacgctcgttcggtgccagcccgcgccagatgctgtttaaggttcagctcccgctggcgatgccgaccatcatggcgggcgtgaaccagacgctgatgctggccctttcgatggtggtgattgcctcgatgatcgccgttggcggtctcggtcagatggtgctgcgcggcattggccgtctcgacatggggctggctaccgtcggcggcgtcgggattgtgatcctcgccattattcttgaccgcctgacccaggccgtcggtcgcgattcacgcagtcgcggcaaccgtcgctggtattccaccggccctgttgggttactcacccgcccctttagaaaataaggaacaacgatgcgacagagcgtactttttgccacagcgtttgccacccttgtctccaccagcacgttcgcggctgacctgccgggcaaaggcattaccgtgcagccggtgcagagcactatttcggaagagagcttccagaccctgctggtcagccgcgcgctggaaaaactgggctatacggttaacacgccgagcgaagtggattacaacgtgggctacacctcgattgcctccggtgacgccacctttaccgccgtaaactggcagccgctgcatgacgatatgtatgccgccgccggtggcgataagaaattctaccgtgaaggcacctttgtcaccggcgcggcgcaggggtacctgatcgacaagaaaaccgccgaccagtaccacatcaccaacatcgaacagctgaaggatccgaagatcgccaaactgtttgacaccaacggtgacggcaaggccgacatgatgggctgctcgccgggctggggctgcgaagcggtgattaaccaccagaacaaggcgttcgatctggcgaaaacggtcgacgtgagccacggcaactattcagcgatgatggccgacaccattgcccgcttcaaagagggtaaaccggtgatctactacacctggacgccgtactgggtgagcgacgtgctgaagccgggtaaagacgtggtgtggctgcaggtgccgttctcctccctgccgggcgagcagaaagatatcgacaccaaactgccgaacggcatgaactacggcttcccggtgaacaccatgcatatcgtggcgaacaaagcctgggcggagaaaaacccggccgcggcgaagctgttctcggtgatgaagctgccgctggcggacatcaacgcccagaacgcgatggtgcacgcgggcaaatcgtctgaggcggatgttaaaggccacgtcgacggctggatcaaggcccaccagcagcagtttgacggctgggtgaaagcggcgctggcggcgcagaagtaaaaccttttccctcaccctaaccctctccccggatcgtacacactgggagaggaccggggtgaggggatcagaccgcacccaacctaaaccgcacaatccagcacgtaacaatccccccacattcacaatcattggctattatggtttccggaaaaataatcacttcactaacgattcctgaaactaatgacaaaaaccactcaagggcttagccccgcactcatccttttaatgtccgtggcaacgggtctggcggtcgccagcaactattacgcgcagcctcttctcgacaccatcgcccgcgcgttcaatctctccgccagttccgcaggctttatcgtcaccgccgcccagctcggctatgccgccgggctgctgttcctggtgccgctcggcgatatgtttgaacgccggatgctgatcgtctccatgacgcttctggccgccggcgggatgctgatcaccgccagcagccagtcgctgacgatgatgattatcggtaccgcgctgacggggctgttctccgtggtggcgcaaatcctggtgccgctcgccgcgaccctcgcctcaccggaaaaacgtggcaaggtggtgggcaccatcatgagcggcctgctgctggggattttgctggcgcgtaccgtcgccgggctgctggcaagcctcggcggctggcgcaccgtatactgggtggcgagcgtattgatggtcgtcatggcgctggcgctgtggcgtgggctgccaaaagtgaagcaggaaaatcacctgaattacccgcagctgctggcctccgttttcagcctgttcacccaggataaacttctgcgcacccgcgccctgctgggctgcttcaccttcgccaacttcagcattctctggacgtcgatggcgtttctgctggccgcgccgccgtttaattattccgaaggggtgattggcctgttcggcctggccggtgccgcaggcgcactgggcgcgcgtcccgcaggcgggctggccgacaagggcaaatcccacctgaccacctccgcggggctggtgttacttctgctctcctgggcggcaatctggtatgggcacgtctcggtgctggcgctgatcgtcggtatcctggtactcgatctcaccgtgcagggcgttcacattaccaatcagaccgtcatctatcgcgtgaagccagaggcgcgtaaccgcctgacggccgggtacatgaccagctactttattggcggcgcggcgggctcgctcatttccgcctcggcgtggcagcatgctggctggtcaggggtatgtgcaattggcgccatcgtcgccacgattaacctgcttgtatggtggcgcggctaccatcgccaggaggcaattcactaagttttacattgctttgggcctcttagggtgtaaaggggcccctcactctgttaatgtaaacgtaatcatttatcccagaaattttaatgtgggtgacatatttacaatcggcatgaatagttcagacccccgtcctcacatcctctcttcagcgggttcatcccctacgctttctgtgctcaccgggtcacggacttacccggcgctttctgatggtgacattaatttggcggatataaccgcacaaataattcatttacattatttgtcactatcgttactatatcggctgtaattaatgaggttatgcccaaatggatagttcgtttacgcccattgaacaaatgcttaaattccgcgccagtcgccatgaggacttcccctatcaggaaatcctgctgactcgcctgtgcatgcacatgcagggtaagctactggaaaaccgcaataaaatgctgaaagctcaagggattaacgagacattgtttatggcgttgatcacgctggagtctcaggaaaaccacagcattcagccttctgagctgagctgcgcgctgggctcctcccgcaccaacgccacccgaattgccgatgagctggaaaagcgcggctggattgagcgccgtgaaagcgataacgatcgccgctgcctgcatctgcaactgaccgataaaggtcacgaattcctgcgcgaggtgctgccacctcagcacaattgcctgcacaaactctggtccgctctcagcaccgccgagcgcgaccagcttgagcacatcactcgcaagctgctcacccgtctggaccagatggatgaagaaggcgccgttcttgaggcgctgcgctaacgcgacgacacgctcaacaatccagatttataagaaaaccgacaggccagcacgtcacactgctggcctttctgacaacaggtcggctcagccgatgtgaaaataagaagatcgtggagaacaacaatgagcgcaaatgcggagagcactaccccgcagcaaccggccaacaagaaaggcaaacgtaagagcgcccttcttctgttgaccttgctctttatcattattgccgtggcatatgggatctattggtttttagtactgcgtcatgctgaagagactgacgacgcgtacgtggcagggaaccaggtacaaattatggcgcaggtgtcgggcagcgtgacgaaagtctgggctgacaataccgactttgtgcaaaaaggcgatgtgctggtgacgctcgatccaaccgacgcccagcaggcgtttgaaaaagcgcagaccgcgctggcctccagcgttcgtcagacccgccagctgatgatcaacagcaaacagctgcaggccaacatcgacgtgcagaaaaccgcactcgcgcaggcacagagcgatctgaaccgccgcgtgccgctcggcaccgccaacctgattggccgtgaagagctgcagcacgcccgcgacgccgtcgccagcgctcaggcacagctggacgtggccattcaacagtacaacgccaaccaggcgatggtgttgggcaccagcctggaaaaccagcctgccgttcagcaggcggcgaccgaagtccgcaacgcgtggcttgccctgcagcgtactaaaatcgtcagcccaatgaccggctatgtctcccgtcgttccgtccagccaggggcgcagatcagcccaaccacgccgctcatggcggttgtgccggcggacaacctgtgggtcgatgccaactttaaagagacgcagcttgcgcatatgcgtatcggccagaccgcaacggttgtcagcgacatctatggcgatgacgtgaagtacaccggcaaagtggtgggtctggatatggggaccggcagcgccttctccctgctgcctgcgcagaacgccaccggtaactggatcaaagtcgtacagcgtctgcccgtgcgtatcgaactggatgccaaacagctggcggatcacccgctgcgtatcggcctctccacgctggtgacggttgacaccgccaaccgcgacggtcagatccttgcaagccaggtgcgtagcagcccggtttatgaaagtaacgcccgtgaaattagcctcgatccggtcaacaagctgatcgatgacatcgtgaaggcaaacgccggttaatccgaaggtgagcgttatgcaacagcaaaagccgcaaaaaccgctggaaggcgcgcagctggtcattatgaccatcgcgctgtcgctggcgacattcatgcaggtgcttgactccaccatcgcaaacgtggcgatcccgaccatcgccggtaaccttggctcgtcgctgagccaggggacctgggtcattacctcgtttggggtggcaaacgccatctccattccgatcaccggctggctggcaaagcgcgtcggtgaggtgaagctgttcctctggtccacggtggcgtttgttctggcctcgtgggcgtgcggcatgtccagtagcctgacgatgctgattttcttccgcgtcattcaggggattgtcgcggggccgctgatcccgctttcccagagtttgctgctgagcaactaccctcccgcaaaacgttccgtcgcgctggcgctctggtcgatgaccgttatcgtcgcgcctatctgcggaccgattttgggcgggtacatcagcgataactaccactggggctggatcttcttcatcaacgtaccgattggcgccgtcgtggtattgatgacgctgcagtcgctgcggggacgagagacgcgcaccgaacagcgccgtatcgacagcatcgggctggcgctgctgatcctgggtatcggcagtctgcagatcatgctcgaccgcggtaaagagctcgactggttcaactcgcaggagatcatcatcctgaccattgtcgcggtggtgtcgataagcttcctgattgtctgggagctgacggacgacaacccgatcgtcgatctctcgctctttaagtcgcgaaacttcaccatcggctgcctgtgtatcagcctcgcctatatgctctacttcggcgcgattgttctgctgccgcagctgttgcaggaggtgtatggctataccgccacctgggcgggtctggcgtcggcacctgtcggggtgatcccggtcctgctgtcgccgattattggccgcttcgcccataagctcgacatgcgtcggctggtgacgttcagcttcatcatgtacgcggtgtgcttctactggcgtgcgtatacctttgagccgggaatggactttggcgcctcggcgtggccgcagttcattcagggctttgcggtggcgtgcttctttatgccgctgaccaccatcacgctctctggcctgccgcccgagcgtctggcggccgcgtcgagcctgtcgaacttcacccgtacgctggcgggctccatcgggacgtcgatcaccaccaccctgtggacgaaccgcgaatcaatgcaccacgcgcagctgaccgaagcggtgaacccgttcaaccctaacgcacagcagatgtacagtcagctgcagggaatggggatgacggagcagcaggcgtccggctggattgcccagcagatcaccaaccaggggctgattatctcggccaacgagattttctggatatcggcagggatctttatcgtcctgctggggctggtgtggtttgccagaccgccgtttggtgccggtggtggcggtggcggcgcgcactagtttgtgcgcgggttgccgggtggcggctacgccttacccgacctacgataactgacacttccgtaggcccggtaagcgcagcgccaccgggcaaccattgccaccgtgtccagaacgcgacagccattgtcagtgccgataaagcagcgcgcctgaaatcgattcacgatagtgaaaagacaacaggagcgcatcatgctgaacacacccgccgacaagtaccaaccctttcccaccctttccctgcccgaccgtcgctggccggaacaacgcatcacccgcgcgccgcgctggctctcgaccgacctgcgcgacggcaaccaggctctggccgaaccgatggacagcacgcgcaagctgcagttctgggatctgctgttaagctgcgggtttaaagagattgaagttgcctttccttccgcctcgcagacggatttcaactttgttcgccagctgattgaagagaaccgcatcccggatgacgtgacgattcaggtgctcactcaggcacgggaagatctcatccatcgcacttttgaatccctgcgcggcgcgaagcaggcgaccgtgcatctgtataacgccaccgctccgctgttccgccgcctggtattcggcatggagaaagcgcaaatcgttgagctggccacccgcgccacgcggcttatccgccagctttgtgaagagaaccctgaaacccgctggcagtacgaatactctccggaaaccttctgctttaccgagccggaatttgcgctggagatttgtgaagccgtggcggagatctggcagccttgcgacgaacgcccgatggtgatcaacttacccgccaccgtcgaagtgagcacgccgaacgtctatgccgaccagatcgagtacttctgtcgccatttcagccgccgccgcgatgtctgcatcagcgtgcatccgcataacgaccgcggtaccggcgtcgcctgcgcggagctggccgtaatggcgggggctgaccgcgtggagggctgtctgttcggtaacggcgagcgcacgggcaacgtctgcctggtgacgctggcgatgaacctctacagccagggtatcagcccgactctggactttagcgatatgaaccgggtggtggaagtggtggaaacctgcaatcagctgccggtgcacccgcgccatccgtgggcaggacggctggcctataccgccttctccggctcgcaccaggacgcaatcaaaaaaggctttgatgcccgcaggcctggcgatcgctgggagatgccttacctgcccgtcgatccccaggatatcggctgcacctacgaagcggtgatccgcgtaaacagccagtcagggaaaagcggcagcgcgtggctgatcgaacagaatcatggtctgaaactgccccgcgccctgcagcaggatttcagccagcacgtgcagcaggaaaccgaccgtcacggaaaagagatgacgcaaaatgcgctgtggcagctgtttcgcacccgctacggtctggtggccacgccgcagtatgcgctgcaatcctaccgcagcgacagccagcaggacggccagctgcgtttgacggccagcgtcgccacacaggggggtacgcgccagctggaaggtcacggcaacggtctgctctctgccgccgctcacggcctgagccgctgggtcaacgccccgttcgtgattaaggattatcacgagcatacgttaggcgaacgcagcgacagccgctcggtggcctacatccgctgcctgttccaggacggcagcagccgctggggcgtgggcattgatagcgacgtggcgcgcgcgtcgcttcaggcgctctttaacgccgtcagtcgttcttaaagtaatcgctgggggagacgcccatcacccgacggaacattgccgtaaaggcgctgtggctgccgtagcccagatccagcgccacgcgcaataccggctggccctgcgccagccgcactaaggcttccagcagacgcgcccttctcaaccactcgccgtagcttaaacccgtctgctgctgaaaatggcggttcagggtgcgctcgctcatgttcatcaggctcgcagcctgcgcgctgctccagctttcccccgggttttgccggatttgcaggcacaggcgacgtagcgcctcgctttccggctccggcaggtgaaacggcagcaccggcatagtgcggatttcatcgagaatcagttcatagacgcgttcatcccggcttccgggtgagtacgattcaggcaacgcaagggagacgaggatcagctcgcgcagcagcggcgcgatctgcacgatctggcaggtggcgggaagatcggcccgcgccagcggatcgataaacagcgttcgcgccgccacgttgccggtaatgcgcagggaatgctgcgtgcccgcaggcagccagacgccgcgaccgggaggcacaacccaacagcccgatgcggtatccacccttaccacgccgctcagggtgtgcagcagctgcgcgcagtcgtgcttgtgccagggttcgctgtcaccatgaacgtaatcatgggcaaacggaacgagaggacggtgggtaaaagagaaggttaaggttgtggtcaaaggaggcaccagcacaatgtaggcccggtcagcgaagcgccaccgggcatccacaggcacaatactagatgtgcagttcctgcagtttttctttcggcagggccagctcttcgttgctgttcacgcgaacgtcgcgttcgatgatgtggcgcgcgatctcctgcgcttcttccagagagtgcatctggtaggtgccgcactggtaaacgttcagctcagggatctggttctgctctttcaccttcagcacgtcttccatggccgctttccaggcatctgcaacacgtttctcttcaggctgaccaatcaggctcatgtagaaaccggtacggcagcccatcggagagatatcgatgatctcaacgccgttgccgttcaggtggtcacgcatgaagccagcgaacaggtgttccagcgtatgaatgcctttctccggcatcacttctttgtttggcacgcagaaacgcagatcgaagacggtgatcgtgtcgccgtgcggggtgtgcatggtcttcgccacgcggactgcaggtgcttccatacgggtatggtcgacagtaaagctatctaataacggcatacgtcacctccgatagtgattttttttaaaataaactgaactcttctacagaatgcgcgtctgagtatatgaaagacgcgcatttgttatcatcatccctgaattcagagatgtatattttggccacagcgatgtggcctttttcttttctgcttaagcctgcttcgccagaaacgcctcaaacgactcggtatccgccgcttcaacctctttctgacgcacaacggacgcttcgcgttccgcgacaaaatctgattcgctcaggatttctaacggctcctggatcagcatttcacggtactccgccgagagtgagcgccccgtaccaccaatgccctgatcaatcatagaacgcagaatgcgcgctgagaacgtcagttccgggttatcaaagcacgccaccagctggtcgcaaatctgttgatacgcgtcgccgccgtcgatgctgtccatcgtccgggcaacacgcttcaggtcacggaacagatctttgccgactttcgtcagcgggaactgtgccgtttcgcagccgatacccagcgtcaggcccggtttacgcccttccagaatcacgcggttccagtttgtacgggtgcagagcaattcgtctgaactcatttccggcgcatccgccagcacgcaccagaccataaacagatccaggaagcgaatctgctgttcatcaacgccaatcggtgagaacgggttgatatccagcgagcgcacttcaatgtattcgatcccgccgcgctgcagcgcatccgacggggtttcgccgctgcgcgtcacgcgcttaggacgaattggcgcatacagctcgttttcaatctgcaggacattgctgttgatctgcaggcgcttaccgtctttttcgaggccgattttttcgtactcttccgacggggttttgatcgcccgcttcaatcctgccacatattcgtgcaattcgttaaacgtaataccgagattgctttgcgatttattggtatagccgagatcgctcagacgcagagaggtggcgtacggaagatagtacattccgcagtcggtcttctcgaacggcagcgtggtcggtttcccctgcaggaacgaagaacagatcgccggggaggcaccaaacagatacgggatcacccagccgaaacggtagtagttgcgtatcaggcggaagtagcctgctgagatggcgtctttatccgtttcaccgcatttcgcctgccagaacgccattggcagcgagaagttgtagtgcacgccagagatggtctgcatcaacgcgccgtagcgatttttaagaccttcgcgatagagcgttttcagccgaccaatgtttgacgtgccatactgcgccagctcaatctcctggccctgctcgatatagcacggcatgctgagcggccacatacgctcatcgccgagattgcgcgcggtgtagcgatggatatcgcgcataatcgtcagcatatgatcaatatcaccctctactggggtgatgaactccagcagcgcttcagcgaaatcggttgtgatccatttatgtgtcagcgccgagcctaacgccttcgggtgacccgtcgtcgctaaactgccgtccgcgttaacgcgcagcgtttcacgctcaagaccacgctgaatacccttcaatgcctgagggtggttttccagccaggccagcgcctgagatacgtccgggatcaaattgacctcccgcctgtcaaagtaatgttactcagcataattgtaatggttgacgattgaaggtcgcgtattcattccaccaattagtgccaccacgtcataccctgtagtgttgcccatgccacgaggacataacgcaacgccttgccaaggcacaaaaaaaagagcaccggtccccaggagatgcgcatccatcccgccagcagacacagtaaatcgcctattacaggcatccagcttaataacagcgtggcagcgccatagcgttttagccagccgactgccttttcctgccagcgcgacttttcgcgcagcggaaagaaacgcccaagaataacgttagtcagccctccaaggctattacccattgttgctattactacaagcagccagggctgactcacgccggacaacagcatcgccaccagcaccacttccgaactgcccggtaacagcgtggcgctgagaaaactgctggcgaataatgaggcaagtgacagcgcgtcactcacagtaagcgtacatccaccgcatccattccggcatcacgcgcggcctggatcccaaaatcggcatcttcaaacacgacgcactttgccgccgggacgcccattaattctgcgcaaagcaggaaggtgtccggtgcgggcttgtgacgtttaacatgatcggcggcgaccacggcagaaaaatagtggcgcaggccaagatgattgagcaaggcttctgcaatcgcgctttcgctgcccgtccccaccgacatcgggcgacgcccgtgccactcttttaccacatcaatcagcggcagaggatgtacggtatctaaaagcatggcttttaccgcatcggttttttcgcgcgcgagcaggtgcgggtcgagatcggcctgattcagttcaatcacggcctgcgcaatacgccaggtgggggagccgttgagggcgatcatcgcctgaaggtcgaaacgcatgccgtagcggcccaggacgtcggtccaggcttgacgatgcgtgggttcggtgtccaggagggtaccatccatatcgaagatcaaaccgtcatactgtgcgtacatcgtgctctcgctaaccgattaacaaagcattactttatcgtaaatggtggtttttgtcgctgacagagagtgtgattgctgacggaacgtcgaaggaataaacaaagaaggagaagatggtgcatccgggaggattcgaacctccgaccgctcggttcgtagccgagtactctatccagctgagctacggatgcatcagggaactactttcagaaataataatggtgcatccgggaggattcgaacctccgaccgctcggttcgtagccgagtactctatccagctgagctacggatgcatcagggtactgctttcagaaatagtaaatggtgcatccgggaggattcgaacctccgaccgctcggttcgtagccgagtactctatccagctgagctacggatgcatcgggatttactactgtactgctcgatattcatatcacttctaaagcaatatgaagtaatagatggtgcatccgggaggattcgaacctccgaccgctcggttcgtagccgagtactctatccagctgagctacggatgcaaaatggcggtgaggcggggattcgaaccccggatgcagcttttgaccgcatactcccttagcaggggagcgccttcagcctctcggccacctcaccacacaacgcctctttcgagtgcttcgagcaactcgttaagagcttctcgtcgctgcgtggcgcatatattactttctgggacttataagtcaaacaattttccaaaagcttttatcgtttgcacaaatcacacgcaattcgcatgtaaaagccgcaaagagggtgttttataagcggattttgcaggcatcttcgcagaaaactgatgcggaaagaacagtgttgggacgagataagggtagcggagtggtcaaaaagagagcgattgaaattaaacggtaactttgcgcaggaaaaatagcgggagggttgcgtctcgcccgacagcgagacgcgacaatatcagtaactggactgctgggatttttcagcctggatacgctggtagatctcttcacggtggacagatacttctttaggagcgttaacaccaatacgtacctggttaccctttacccctaaaactgtcacggtgacctcatccccaatcatgagggtctcaccaactcgacgagtcagaatcagcattctttgctccttgaaagattaaaagagtcgggtctcttgtatcccggcattatccatcatataacgccaaaaagtaagcgatgacaaacacgtaaagtgtaagcagtcacggcatcacattctgttaaacgtaagtttagccgatatacacaaactcaacctgactttatcgttatcgatagcacagtgaacaagacgccataacgttaccgctatggcgtctgcttgtgctttgtagttattacagtttcgcgcttacccagctttcaacgctggctaatgccgcaggaagtgccgccgcatccgtaccaccggcttgcgccatgtccggacgaccgccacccttgccgcccacctgctgagcgaccataccaatcagttcccctgcttttacgcggtcagtcacatccttagagacgcccgcaatcagagaaaccttaccttctgctactgtcgccagcacgataacggtagaaccgagctggttcttgagatcgtcgaccatagtacgcagcatcttaggctcaacgcccgccagatcgctgaccagcagtttgacgcccttaatgtctacagccttgctggagaggtttgcactctcctgcgccgcagcctgctctttcagctgctgcagctctttttccagctgacgcgtgcgatccagcgcaacgcgcactttctcgcccaggttctggctatcgcctttcagcagctgcgcgatgtcgtgcagctgatcgctctgcgcatgcaggctggcaatcgcgccttcaccggtcaccgcttcaatacgacgcacgcctgccgccgttcccgactcggaaacgatgcggaacaggccgatgtcaccggtgcgcgaggcgtgtgtaccgccgcacagttcggtagagaagtcgcccatgctcagcacgcgaacacgttcgtcgtatttctcgccaaacagcgccatcgcaccttttttcttcgcgtcttcgagatccatgatgtgggtctcgattggcaggttacgacggatctgcgcgttcaccagatcttccaccgcgcggatttcagacggcttcatcgcttcaaaatgcgagaagtcgaagcgcagcactttatcgttaaccagagaacctttctgtgcaacgtggataccgagcacgtcgcgcagggcagcgtgcatcaggtgggttgccgagtggttcagacgaatgcgcgcgcggcgagcttcatcaacgttagcctggacgccctcgcccactttcagagaaccggaaaccagtttgccctggtgaccaatcgcctgaccgtatttctgggtgtcgctgacgctaaagctgaaaccattgcccttcagttcgcctttatcgccaacctggccgccggattcggcgtagaacggcgttttgtccagaatgactacggcttcctgacctgcgctgatgctgtccacggctttgccgtcaacaaacagggcggtcactttgccggtcagttccagcgcctcataacctttgaattcagacgcgctatcaacgcggatcatcgcgttatagtctgcaccgaaaccgctggactcgcgcgcacgacggcgctgctcttccatcgcggcttcgaagcccgcttcgtcaactttaatgttacgctcgcggcaaacgtccgctgtcaggtcaaccgggaagccgtaggtgtcgtacaggcggaaagcggtttcgccgtccagggtgtcgcccttgagtttcgccagctcttcgtccagcagcgccagaccgcgctccagcgtacgggcaaactgctcttcttcggttttcagaacctgctcaacctgcgcctgctggcgtttcagctcgtcacccgctgaccccatcacgccaatcagtggcccaacgagtttatagaagaaggtgtccttcgcgcccagcatgttgccgtgacgaatagcacgacgaatgatacgacgcagcacgtagccacggttttcattcgacgggataacgccgtcggcaatcaggaacgcgcaggaacgaatgtggtctgcgataacgcgcagcgatttattattcaggtcggtcgcgccggtcacttccgcaacggctttgatcagagtgctgaacaggtcaatctcatagttggagttaacgtgctgcagtaccgcggcaatacgctccagacccataccggtatcaacggacggcttcggcagcggctccatggtaccgtcggcctgacggttgaactgcatgaagacgatattccagatctcaatgtagcgatcgccgtcttcttccgggctgcctggagggccgccccagatgtggtcgccgtgatcgtagaagatctcggtgcacggaccgcaaggaccggtgtcacccatctgccagaagttgtcagacgcgtatggcgcgcctttgttatcaccgatgcgaataatacgctcgcgcgggataccgacctctttttcccagatttcgtaggcttcgtcatcggtttcatagacggtaacccacagacgctctttcggcaggttgaaccagttttcaccggtcagcagttcccacgcgtattgaatggcatcgtgtttgaagtagtcgccgaagctgaagttacccagcatttcgaagaaggtgtggtgacgcgcggtgtaaccgacgttttccaggtcgttgtgtttaccgcccgcacgcacgcaacgctgtgaggttgtggcgcgggaataattacgcttgtcgagaccaaggaacacatccttgaactggttcatcccggcgttggtaaacagcagagtcggatcgttgttcggtaccagggagctgctggcaacaacctggtgtcccttactatggaaaaaatcgagaaacgcctgacggatctcagcggtgctcttgctcataattatcctgaaatcaagctaacgaaatgtcgtagccagcctgtatcggtaaaccgttggacagaccagctactggaaaaagtgggaataagataagttttctttagtgggaagtaaaatcccgcatgcgttcaatcggcaaaattacgccagatatcctgaatatcttccatcaggaagccgcggtagagcaaaaagcgctggattttgactttttctgaaaattcacgcggcagcggttcgccgtacttgcgaatcgcctgctcttttgccagctcgcaccagtccgtatcgcattcgcgcatcgctttttcgatggactcccgggccacccctttctggttcagctcctgccggatgcgcgcagggccgtaccccttgcggccgcggctggcgagaaagcgggaagcaaagcgatcgtcgtccaggtaatgatgctcatagcaccaggccaccacgcggtcgtagtcttccgccgtggcatcaatctcttccgacccgtttttactcatcaccggagccgacagcttccgccgcagctcctgctcactgtggtcacgcacggccaggatgcgcaccgcacgatccagcaagcgcgcgtaggcgggtcggcgtgatgtcggttcactcataaaaaacctatagaatcagaaatgcaaaaagggccgcatcagcagcccttcatctttacacgagagacttaaaagtcttcgttggtttcttcagcatccgcagcatcgactacgaaatcaggtttggagtcctggttgttcagcagaagctcgcgcaccttcttctcaatctctttcgccgcagccgggttctctttcagccaggagatagcattcgctttaccctgaccaatcttgtcaccgttgtagctgtaccaggcgcccgctttttcaatcagcttctctttcacgcccaggtcaaccagttcaccgtagaagttgatcccttcaccgtagaggatctggaactcagcctgtttgaacggtgcagcgattttgttcttcaccaccttcacgcgggtttcgctaccgacgacgttttcaccctctttcaccgcaccgatacggcggatatccagacggacagacgcgtagaatttcagggcgttaccaccggttgtggtttccgggttaccgaacatcacaccaattttcatacggatctggttgatgaagatcagcagcgtgttggactgcttcaggttaccggccagcttacgcatcgcctggctcatcatacgtgccgcgaggcccatgtgagagtcgccgatttcaccttcgatttccgcttttggcgtcagtgcggcaacggagtcaacaacgataacgtcaaccgcaccggagcgcgccagcgcgtcacaaatttccagcgcctgctcaccggtgtccggctgagaacagagcaggttgtcgatgtccacgcccagcttacgcgcataaacaggatccagcgcgtgctcggcatcgatgaacgcacaggttttaccttcgcgctgtgccgcagcaatcacctgcagcgtcagggtagttttaccggaggattctggcccgtagatctctacgatacggcccattggcaggccgcccgcgcccagcgcgatatccagagaaagcgaaccggtggagatcgtttccacatccatggtacggtcttcacccaggcgcatgatggagcctttaccgaattgcttttcgatctggcccagtgctgccgccaacgctttctgtttgttttcgtcgatagccattattactcctgtcatgccgggagaagcgactgtgcttcaccgtggatttctgttctgttggtgcaattatactgtatggtcatacagtatcaagtattttgtagaaattgttgccagagcgtttttaacgcatattccgttgcctgacggcgcacgctttcgcgatcgccgctgaagcactcccgacgggtgatcccttcccctttagacgtggcaaacccaaaccagacggtgccaacaggcttcacgtcgctgccgccgtccggccccgcgatgccgctaatggaaatcgcgtaatctgcccgcgccgccttgagcgcgccaatggccatttcaatgaccaccggttcactgaccgcgccatgctgttccagcgtggcttcacgcacgccaatcatttgtgccttagcttcgttactgtaggtcacaaaaccgcgttcaaaccaggcggaactgccggcaatatcggtaatcactttcgccacccagccgccggtgcaggattccgcggtggtcattgtcgccccacgctgcttaagcgccaggccaacgatctcgctaagctgcatcaattcatggtcagtcattctcgctccaggcatcagaaaaacgtgctgcacaagatagcactttctcgtcagatgtggggatgcgcttcaggttttacgagggggcttcagaaaaaagccggtgcaaacgcaccggccgtggaagaggttatttcatgctgtcggcgagggtattcacattgtggcggaacgccttgacgtaggtgtctgccacgccgccttttgccgacaaggcctccggataaagttctccccctggctgcgcgcccgtcgctgaggcaatctgcttcaccagacgcggatcgagctggttttccataaaccaggtttttacgccgtcggctttgatctgattgatgatctcagcaacctgcgccgcgctggcctcgctctctgaagagagtccttgaggtgccatgaaggttacgccataagcgcggctgaaatagccgaaggcgtcatggctggtcagcaccttgcgcttcgcctgcgggatctggctaaagcgcgttttggcccagctatccagctggttgagctgcgtgatatagggtttaccggaggcttccagcgcggctttgtcctgcggatcggctttcaccagcccgttcagaatattttgtgcatataacgccccgttcgccgcgctgttccacgcgtgcggatcggtcacggtctttccatcttcctcaagcgtgtgcgttttcacgcctgttgaggcgacgaccagttgccctttgaacccggaggctttcaccaggcggtcaagccagccctccagccccagaccgttcaccaccaccacatcggccttgctcagcgccgcgctgtccttcggcgacggttcgaaggtatgcggatcgccgtccggccccaccagcgtcgtcactttcacatgatcgccgcccacctcctgggtgatgtcccccagtatcgagaagctggtgaccacattcagcgttttcgccatcacgccctgcgacatcatccccagcgcgagcgccactgccactactagtcctgtacgtttcatcgtttccccttgcgttaaaaatacgcccgcagactgccagcgagcctgcttcgcgtacccaataaaatggaaataaagaacagcgcgctggcggtgagcacaatggatggcccggccgggagactcatcgcccaggagaggctcaaccccagccatgcgcagacaataccgctgatgcccgccatcaggagtaatgccggtagcgtgcgtacccagcagcgtgccgccacggccggcagcatcatcagaccgacggccatcagcgtgccgagcacctgaaaaccggccactaggttaagaaccagcagcgccagaaacagtccgtgcagcaggccgggcagccagcgggcgttcacctgtagccaggcggtgtcaaacgcttcggtaaccaggccgcgataaaacatcgccagcacgatgagagtgaacatgcacacgcccgtgacaaacagcgcggcgtcgttgtccacggcgaggatggagccaaacagcaaatgcagcagatcgacattcgacccacgaagcgataccagcgtgacccccagcgccagtgagccaagataaaatccggcaaagctggcatcttccttaagcggcgtgcgtcggctgaccagaccggccagcagcgccacggtaatgcccgcgacaaaaccgccgatactcattgccagcagcgacaggccgctgagcaggtatcccacggcgacgcccggcaaaatagcgtgagaaagggcatcgcccatcaggctcatccggcgcagctggaggaatacgccgagcgcggtggtgctgatagaaagcgccaggcaaaccaccagcgcgcggcgcataaagccgtactcgatgaacggctggaagaatgtgtgccagatcatgccaccctcacccgctcggttttccactgaggcacatcagcatccagccgcaacgtctgcgggaagtggcgcgacacgcgctcgctgtcgtgcagtaccgcgagcagcgtttgcccctgcatatacatctccagcatcacatccatcagcacgttacaggtggcttcatcgatgccggtaaagggctcgtccagcatcaccagcggcgcctgctgtaccaggacgcgggcaaacaacatgcgctggaactggccgccggagagctcatcgatggtggataacgccatggatgccagcccgacccgctcaagcgcgctggcaataggcaaccgcgtttcgcgacgaaacccggaaagcagcgaaatgcccggccagcagcccatgctgacgacatcgcgcacggtcagcggaaactgcgcctccagcgcgtgacgctgtgccagccagccaatcaccggtcgcttcccctgccagcgaaaaccgccgcttacgggtgggataaaaccggcgagcgttttcagcagtgtggatttgccgcagccgttggccccaacaatggcggtcatgctgccgcgttcaatgacgcccgaaagcgggcgcgtgacgggctggtggtcgtaacccgcaaccagttcattcatcacgatcatggcaatgccaccgcccagcgcacggccaggccgagaaagacgataagcaccagcgccagcaaaagccgaaccggcgcagaaagagagaaaagggacgttgacatctcggcaccaatttaaatgttataacataacaataataaaaggtgattaggatgtaaatggcagggttgaaaagggagtgtggcgaaatgtttctgcaaaacgccctctcccatgggagagggcaacaggccgcaccgtgcgcgcagccatgccgggtggcggcgttgccttacccggcctacccgtcggggtaacttactgactaaacggtgacgccgccggcacgcgggcctgcgataccgccagccccagctgccacacggccatcgcatagtgggtgctgtggttatagcgggtgatggtgtagaagttcggcagcccgtaccagtactgatagcccgttccgacatcgagacgcagcagactcgcctgctgtgcattgcccagcggctgcgttggcgttaggcctgtcgcggacagctgcgaaatgctgtagttggttttgaagccgttttccagccccggcgcctgaccgttcgcctgcaccgccacctggccacccggcacccagccgtgcgctttgaagtagttcgccacgctgccgatggcatccaccggatcccacaggttgatatggccatctccgttaaagtcgacggcatactgtttataggaggacggcataaactggccgtagcccatcgcgccggcaaacgaccctttcagatcgagcggatcgtcctgctcgttacgcgccatcagcaggaaggtttccagctcggaagagaaatactccgcgcggcgcgggtagttaaaggagagcgtcgccagcgcatccagaatgcgggttttgcccatcacgcggccccagcgggtttccacgccgataatcccgacgataatttcaggcggcacgccgtacacctgccacgcacggttaagcgcatcttcatactgattccagaacgccacgccgttttgcacgttgtccggggtaatgaactgtttgcgatagcgcagccacgccccgtttggcccgctcggcacctgggccgtcggcgcctgtctgtccatcaggcgcagcacgtagtccagacgcttggcctgagacaaaatttcgtgcagctgctgtctgtcaaagccgtgcttgctcaccattttatcgatgaactgctcggccgccgggttattcgcgaagtcgccgcccatctgcatcatattgtgctgcggctccagcaagaatcctccggaaggcgcgcccgccgtttgctgaacggcttcggtcttaggtttgctactacaggcagacagcagaataagcgcaggcaacagcgctgcataacgacgcttgaacatgagacatccatttaacgggttcgataagaacccagtatggtaaagcatccgcaacacctcaaggaagcggtacgcacctccccaacgcaaatccgtgcttttttcccccgaaaatcattcaccacgtcaattatctttcaaaataatccatttttctttcattgtgagatctaactaacactttaaaacctttcaaagtgattattattagccacagatagacaaaaacaaacgccctacaggagagaagaatgatagaaaccatcacccacggcgccgagtggttcatcgggctgtttcagaaaggcggagaagtgttcaccggcatggtgaccgggatcctgcccctgctgatcagcctgctggtgatcatgaacgcgctgattaactttatcggccagcagcgcattgagcgcttcgcccagcgctgcgccgggaacccgctgtcccgctacctggttttacccttcatcggcaccttcgtgttctgcaacccgatgaccttaagcctcggccgctttatgccagagaagtacaagccgagctattacgccgccgcctcctacagctgccactccatgaacggcctgttcccgcacatcaaccccggcgaactgtttgtctatctcgggatcgccagcggcctgaccacgcttggcctgccgctcggcccgctggcggtgagctacctgctggtcggtctggtgaccaacttcttccgcggctgggtgaccgacctcaccaccgctattttcgagaaaaaaatgggcatccagcttgaacagaaagtccatctttcaggagcaacagcatgaaccggatccgcattgagaaaggcacgggcggctggggcggcccgctggagttcgacgccaccgaaggcaaaaagattgtgtacatcaccgcgggcacgcgcccggcgatcgtcgacacgttgcgcgatctgaccggctgggaagcggtcgacggcttcaaggaaggcgaaccgccggaagcggaaatcggcgtggcggtgatcgactgcggcggcacgctgcgctgcggcatctatccgaagcgccgcattccgacggtaaatattcactccaccgggaaatccggcccgctggcgcagtacatcctcgaagacatttatgtctcaggcgtgaaggaagacaacatcaccctggtgaaggggacgtctgcgccgcaaaaagcggccccgcgcgagtacgacaccagcaagaaaattaccgagcagagcgatggcctgctggcaaaggtcgggatgggcatgggttccgccgtggcggtactgttccagtccgggcgcgacaccatcgacacggtgctgaagaccattctgccgtttatggcgttcgtctcggcgctgatcggcatcatcatggcttccggcctgggcgactggattgcccacggcctcgccccgctcgccagccacccgctcgggctggtcacgctggcgctgatctgctccttcccgttgctgtcgccgttcctcggcccgggcgcggtgattgctcaggtcatcggcgtgctgattggcgtgcagattggtctggggaacattcccccgcacctcgccctgcccgccctgtttgccattaacgcccaggcagcgtgcgactttatccccgtggggctgtcgctggcggaagcacgccaggacaccgtgcgcgtgggcgtgccgtccgtgctggtcagccgcttcctgacgggcgcgccgacggtgctgattgcctggtttgtctccggctttatttatcaataagaggttcctgccatgaccgtgatttaccagaccaccattacccgcatcggccagagcgcggcggatgcgctgagcgaccagatgctgatcacctttcgcgaaggggcgcctgcggatatccaagagttttgctttatccactgccacggcgagctgaacggtgagctgaaggccgggagccagctggagctgggcgaggcgcgctatgccgtgaccgccgtcggcgacgtcgctgaacaaaacctgcgcgagctgggccacatcaccctgcgtttcgacggccagccgcaggcggaatatcccggcacggttcacgtagcgggcccggttccgcaggccgttaccccaggctgcacgttaaaatttgttgcgtaattaaggagatagacatgagtcaggttgccgttgtcattggtgggggacaaaccttaggcgagttcctctgccgtgggcttgccgctgagggttaccgcgtggcggtagtggatattcagagtgaaaaggccgcccgcgtggcggacaccatcaacaccgagtttggtgaaggaatggcgtacgggtttggcgccgacgccaccagcgagcagagcgtgatggcgctcgcccgcggcgtggacgacatttttgggcgtaccgacctgctggtttacagcgccggcattgcgaaagcggcctttatcagcgacttcgagctgggggattttgaccgctcgctgcaggtcaatctggtgggctatttcctctgcgcccgcgagttttcccgtctgatgatccgcgacggcattcaggggcgcatcattcagatcaactcaaaatcggggaaagtgggcagcaagcacaactccggctacagcgcggcgaagtttggcggcgtggggctgacacagtctctggcgctggatctggccgaatacggcattaccgtccactcgctgatgctgggcaatctgctgaaatcgccgatgttccagtccctgctgccgcagtacgccaccaagctcggtattaaagcggaagaagtggagcagtactacatcgataaagtgccgctcaagcgcgggtgcgactatcaggacgtgctgaacatgctgctgttttacgccagcccgaaagcctcatactgcaccggacagtcgattaacgtcaccggtgggcaggtgatgttctgagttcattccccggtggcgctgcgcttaccggggctataatccccgtaggccgggtaaggcgcagccgccacccggcaattaaaggagccgatatggtcaccgcattcattaccgtcgccgccctcgcctggctctgccagatggcgtttggcggctggcaaatctatcggtttaaccgcgagtttgacgccctgtgccagaaaggccgcgtgggcgtcgggcgttccggtggacgcttcaagccgcgggtcgtcgtggctgttgcgctggatgaaaacaacaaggtctgcgattccctcatcatgcgcggcatgaccgtctttgcccgtccggtgaaaatccaggcaatcaacggcattttgctgcaggaattgcagcccgatgtgatctttccccatgatccactttgtcagaatgcactatcattagcgcttaatctgaaacatggataatttcgttgtgaaagatatagacttgcgaaattatcatttcgcaacctaaggaacgaagcgcctatgaaacctcgtcagcggcaggcggccattcttgagcatctgcaaaagcagggaaaatgctcggtagaggatctggcccactactttgacaccaccggcacaacgatacgcaaggacctcgtattgctcgaaaactctggcgccgtcattcgaacctacggcggcgtggtgctcaataaagacgaagcggacccgcctatcgaccacaaaacgctgatcaatacccaccagaaagcgctgattgccgaagccgccgtaaaatttatccacgatggcgactcgatcattctggatgcaggcagtaccgtcctgcagatgatccccctgctcagccgctttaacaacatcacggtgatgaccaacagcctgcacatcgtcaacgccctgtcggagaacgactgcgagcagaccatcctgatgcccggcggcaccttccgtaaaaaatccgcgtcgttccacgggcagctggcggagaacgccttcgaccacttcagcttcgataaactgtttatgggtaccgacggcatcgacctgaacgcgggcgtcacgacgtttaacgaggtgttcagcgtcagtaaagccatgtgcaacgccgcgcgggaagtgattctgatggcggactcgtcgaagtttggccgcaaaagccccaacattgtctgtagccttgaaagcgttgataagctgattaccgacgcgggtatcgacccggcgttcaaaaaagcgctggaagagaaaggcatcgacgtgatcgtaaccggagagagagatgagtgattttctgttagaaacgggccgccagacgctgatgctggagctgcaggaagccagccgcctgccggaacgtctgggcgaggattttgtccgcgcggccaacaccattatccactgcgaaggcaaagtgatcgtggcgggcatcggtaaatccggccacatcggcaaaaagattgccgcgacgctggccagcaccggcaccccggccttcttcgtgcaccctgccgaagcgctgcacggcgatctgggaatgattgaaagccgcgacgtgatgctgtttatctcctactccggttcggcgaaagagctggacctgattattccacgtctgcaggaaaaatcggtcgccctgctggcgatgaccgggaaatcccgctcgcccctggcgctggccgccaaagcgacgctggatatttccgttgagcgtgaggcctgtccgatgcacctcgcccccacctccagcaccgtaaataccctgatgatgggcgacgcgctggcgatggcggtaatgcaggcgcgcgggtttaacgaagaagatttcgcccgctcgcatccggcgggggcgctcggggcacgcctgctcaacaaggttcaccacctgatgcgcactgacgatgcgattccacaggtcaagctcaataccagcgtcatggacgcgatgctggagctcagccgcaccggtctggggctggtggcggtgtgcgatgacgacgggtacgtcaaaggcgtgttcaccgacggcgacctgcgccgctggctggtgggcggcggtaagctggaaacagacgtgtcggacgccatgacccagggcgggctgacgctgaacgccgagagccgcgccattgaagccaaagaggtgctgatgaagcgcaaaatcaccgccgcaccggtggtggatgacaccggcagactgtgcggtgccattaacctgcaggatttctatcaggccgggattatctaacccttcagcccgagacgcttcgccagccggtgcaggttggcgacgtccatctccagcgctcgggcgcacgccgcccagttgcggttattctgatccagcgcgcggataatcatctgacgctgaaacgcctctgtcgcgtcacgcaggttttcgctcgttatctccggagctgcatgggcaatcgtcggtgcggtttcatcatgctgcgcaaaatgccgggcatgtataaccacttcatcacctgaacgcgtcgctcgcgccagcaccaccgcgcggtgaatcgcatgctccagctcgcgcacgttgcccggccagccgtagctcagcagatgcgatctcgcccccgggcttaacaccacgcgggaaagccccatcctgagacggcactgttcgcagaaatagcccgccagcagcaccacgtcgtccccgcgctcgcgcagcggcggcacggtaagcgggaacacgctcaggcggtggaacaggtcggcgcggaactgcccggccagcaccgcttcacgcaggtcgcggttcgtcgccgccagcacgcgaacgtccactctgtgactgcggtcatcccccacgcgctggatatcgccgtactgcaatacgcgcagaagtttggcctggagcgacagagagagctcacctatttcatccagaaacagcgtgccgttatcggccatttcgaacttgccgctgcggttgctgatggcgccggtaaacgcccctttgacgtggccaaacaattcgctttccgccacgctttccggcagcgcggcgcagttgaggtacaccagcggattgaccgcgcgcggcgacgcttcgtgaatcgacttcgctaccagctccttgccggtgccggtctccccgaagatcagcacgttcaaatcggacgcagcaacaatctcaatctcttttttgagctgcgccatgcccggcgagaggccaatcatctccgtgtgcgtcacctgctcaaacgccgccgggctgccgggagaaatattctgactctccagctgttcaatcagcagcgcattgttcagcgccccggcggccagggcggcaatcaggcgaagctcctcatcgctgaaggtatcgaactggtccggcgacaggccgtcgagggtcagcgccccaatcagattctgcccggcaaacagcggcaggccgatacaggcgtgcaccttcaggctctcctggcctggaatcagcccgtcgtacgggtcgggcagatcgctgtccgccgggaaacgcaccacgtcacccgcgcgggcgatagtttccagacgcggatggccttcaagggtaaagcgccgcccgagcacgtccttcgccaggccgtcgatggccagcggaataaactgccgtccttcgtagcgcagcagcgccgaggcgtcgcacgccagcacgtggcgcagcgtggagatcagccgctggaagcggtcctgatgaccaataccggtttgcagttcaatggcgattttcgccagcacgtctacggaaaagctcatctctgcctcgctgtcattttgacagtgcatgttgtcatagtgacactgtttttaatagtcataatgactaccaatttcggattatcaaagtattaacctataaaaatcaatatcttaaaagttggcacgcggcttgatataagcaaaccatcctatttgaaaaacgcgatattacgctgaggtttgctatgtctattctggttaaaaataacattcattgggtgggtcaacgtgactgggaagtgcgcgatttccacgggacggaatataaaacgctgcgcggcagcagctacaacagctatctcattcgtgaaggtaaaaatgtgctgatcgataccgtcgatcacaagttcagccgcgagttcgtgcagaacctgcgcggcgaaatcgatctgaacgccatcgactacatcatcatcaaccacgcggaggaggatcacgccggggccctgaccgagctgatgtcgtatattccggacaccccgatctactgcaccaccaacgccatcgactcgatcaacggccaccaccaccatccggagtggaacttccacaccgtgaaaacgggcgacgcgctggatatcggcaacggcaagcagctgatcttcgtggaaacgccgatgctgcactggccggacagcatgatgacctacatgaccggcgacgcggtgctgttcagcaacgacgccttcggccagcactactgcgacgaacgcctgttcaatgacgaagtggatcagaccgagctgttcgagcagtgccagcgctactacgccaatatcctgactccgttcagccgtctggtgacgcctaaaatcaccgagatcctcggctttaacctgccggtggagatgattgccacctcccacggcgtggtgtggcgtgaaaaccccacccagatcgtggagctgtacctgaagtgggcggcggattatcaggaagatcgcatcacgatcttctacgacaccatgtccaacaacacccgcatgatggcggacgccattgcccagggcatcaacgaagtggacccgaacgtggcggtgaaaatcttcaacgtggcgcgcagcgataaaaacgagatcctcaccaacgttttccgctcaaaaggggtgctggtaggtacgtccaccatgaacaacgtgatgatgccgaagattgccggtctggtcgaagagatgaccggcctgcgttttcgcaacaagcgcgccagcgcctttggctcccacggctggagcggcggcgcggtcgaccgcctttccacccgtttacaggatgcagggtttgagatgtcgatgagcctgaaagcgaaatggcggccggatatcgacgccctggaaatctgccgccagcacggccgcgacattgcccgtcagtgggcgctcgcaccgctgccggaaaccgcccccgccgcggcggttgcgccggaagccgtagctgaagccgccgctgccgacctcggtccttgcatgcagtgcagcgtgtgccagtggatttacgacccggaacggggcgagccgctgcaggatgtcgctccgggcacgccgtggagcgaggtgccggacagcttcctctgcccggaatgttccctcgggaaagacgtttttgatgaactggcaacggaggcaaaatgagccacggtatcgtcattatcggctcgggctttgccgcccgccagctggtgaaaaatatccgcaagcaggacgctaacgtgccgctgacgctgatcgccgccgacagcatggacgagtacaacaagcctgatttaagccacgtcattagccagaaccagcgcgcagacgatctcacccgccagacggcgggggcgttcgcagaacagtttaacctgcgtctgtttccgtacacctgggtcaccgatatcgacgccaacgtccgtctggtgaaagcgaaagataaaacctggcagtacgacaagctagtgctggccacgggtgcctctgcgtttgtgccgccggttgagggccgcgagctgatggtcacgctcaacagccagcaggcgtatcaggccagcgaaacggagcttcgcgacgccacgcgggtgatgattgtcggcggcgggctgatcggtaccgagctggcgatggacttctgccgggcaggtaaatccgtcaccctggtcgaccacgcggcgagcattctgtcagcgctgatgcccgcggaagtgagcagccgcttacagcatcgtctgaccgacatgggcgtccatctgctgctgaaatcgcagctgcagagcctgagcaaaaccggcagcggcctacgtgcaacgctcgaccgcagccgcagcgtggaggtggatgtggtgattgcggcgacggggttgcgcccggaaacggcgctggcgcaccgcgcaggcgccgaaatcaaccgcggcgtgaaggttaacagctacctgcaaaccacccagccggacatgtatgccctgggcgactgcgcggaaattaacggccaggtgctgccgttcctgcaaccgattcagttaagcgccatgtgcctggcgaaaaacctgctcggcggcaacgccccggtgaaattacccgccatgctggtcaaagtgaaaacgccggaattaccgctgcatctcgcaggcgaaacgcagcgtcaggatctggactggcagattgccctttcgccgcagggcatggtggcgcgcggcaccgataccgacggtcagatgcgcgcctttgtcgtcagtgaggacagaatgaaggaggccttcgccctgctgaaatcgctccctgcttaaccctcgtattgccgggtggcgctccgcttacccggcctacatgcagacccgtgcaagcgtagcgccaccggactgggtcgttcaggaacgtaccaccagcgcgtcgtagccgcgccagcggtaattcgccatggagatcagccagcaggcgacaaacagacccacgacgacaaacccggcgttgcccagattgtcgtttaccgcgccaatcagatcccagaggccgccgctgagggcaaatttatccatcagcagacccagcgcttccagcccgccgataaacagcgccaccaccacagaagtgccggtgatggtcatgttgtagtaaagcttgcgctgcggtttgttaaacgcccagccgtaggcacccaccatcagtaggttgtcgagggtatccaccagcgccatgccgctggcgaagagtgccgggaagatcatgattgaccacaccgacattccgctggacgcgctggcggcagagatccccagcacgccgatctcggtggccgtatcaaagccgagaccgaacaggaaaccgaccaggtacatctgccagcttttattgacgaggcggaaggtcttgccgaacagccagttcatcaccccgccctgagccggtagcgtgatgtcgtcctgcaccggcctgccgcgttttagcgcctgaaaactgcgccagacgccgcgcaggatcaccatattcaccaacgccatcgccagcaggaaggtcgcggaaacggcggtgccaatcaggctgccggtttcgtggaaccacgccatgttcttctgaaacgccgtggcggtagcggcgatggcaatggaggccagcaccacgatggtggagtggcccagcgagaaccacgcccccacgccggacgggcgtttgccctgctgcatcatcttacgcgtcacggtatcaatggcggcaatgtggtcagcgtccaccgcatgacgcagcccgtagcaccacgccagcaggcttgccgccatcagcgccgtgctgccgctaaaggtgtgccatgcccatccccaggccaccaggtttgccattaccagagccagcagcaggagcgcggcgcgaggttcattgcgtaatagtcgtaacattttaattcctttgtaaacatgaccgggcagcggcgaccaccgcctgcccgaaggagatcgctccgtcacctgcgggcaggcgcgaaggaaaaagaagcgtaaagtcagaaagataatgacgcagacgcgcgcgcagcagacggttgtgcaataccccgccgctgaggcagattgtcgacagcgacaggcgccgggcgtgaaacgcggcgagctccgccagcccttttgccagcgcgtcgtgaaacgcccaggcgcgcgcgcagggctccgcctgccagctcagccacagctgccagaaatgcgcgaggttatccgcgtccagcgtcaccggatggtcgacacccgcgcactgcgatgccagggcttccagccggcaggcggcttcaccttcccaggattgggtttcgatacccagcgcgcaggcgactgcatcaaacaggcgaccgcaggacgaggcccgcggcgcgttgaggccacgctggatcgccgtcgccagcagcggccagttctggcgctgtaccgcgtgggtttccgggtactgctgccagtcaggcacaaacgccaggcagtgggcgagcagattgcgccacggctgccgcgccgccagatcgccacccggcagcgcaacggcaggcaggccacccagatgcgcgtattcgagatagctgacccgcaggcactctccaccccacagcgcgccgttttcccccatgccgatcccgtccagcgtcagggcgataacgtctccgccctcgcgcggccagccgttttcggccaggcacgccgcggcgtgagcgtgatggtggtgtacctcttcaaggggcaacgcctgcgcctgcgcccactggcgagcgcggtatcccggatgggcatcgcacaccacgcgcgtcggctgaaaggcgtaaatgtcctgcatcaccgacagcgcggaacgccactgcgcttccacaccctcgtcaccgagatcgccaaaatgctggctcagcaccgcctggttcccacgcaccaggcagaaggtgtttttcatctccgccccggtgcacagcatggcggggatattgtcgaacccggcaggcagcgtgatggcatcgggcacaaagccgcgcgcgcgacgcagcatcgcaccgtcccgatccatcaccgaatcgtccatccgctgcaggatatcgcggttatgcagcaggaagccgtccgcgatgccgctgagctcatccagcgcctggcggttggtgacggcaggcggtctgccgctgaggttgccggaggtcatcaccagcgggcgctgacagtccatcatcagaagatgctgcagcgggttcgcaggaagcatgatgcccacggaatccagaccgggcgcgataccttccgggagcgcgggcagccaggcttttggcgtgagcacaatgggtgcggcgggtgagcgcagcagtgcctgaaccgtctccggcaggtcatccgcatgcgggatcattaccgccagcggcttcgacgggcgctgcttgcgtgaccgaagcgtcgcaaccgcctgcgggttacgcgcatcgcagacgaggtgaaagccgcccagccctttaaccgcaacaataccgccgcttttcagcatcgctaccgccgcgcgcagcgcagcctcgcgctcagcggtcatgtcgcccgcacgccacgccagcgcgggtccgcagtccgggcaggcgaccggctgggcgtgaaaacggcggtcggcaggattacggtactctgcttcacacggcccgcagagcgggaacggcgccattgccgtggccggacggtcatagggcatcgcgcggataatggtaaaccgcggcccgcagtgggtgcagttgataaacggatagcgatagcggcgttcgcgtgggtcgcacatctcagccagacacgccgggcaggtcgcggcatcggggacaatctgggtgtccatcgtcccgcctgcgctgtggcggatggtaaagtcctccggcacgtgcgcccaggtaaacggctgcgtttccacgcgatcaatgcgtgccagcggcgggcagtcctgatgcagcctcgcggtaaaggcccccccattacccgcgaggcgcaccagcacgccctctccgtcattgcagacgtcaccggtcagctgaagcgcctgcgccagctgccagacgaagggacgaaaccccacgccctgcaccttgccgcgcacccgcagctgaacgccgttgctgctcatacggctcagaacagcagtgatgacgaggtgtcgaacgccgcgcgacggcgcttttcggcgctcatctgctcaagcttgtcgcgatccacgcagaccagcgcgtgcgtcgggcaggcttccatacaggccgggccggcctcacggtggtagcacaggtcgcacttgttggcttcggctttctccgcccgcacgctcagccccataccgctgttgcgcaccaccggacggaccaccacctccatcgcgccatacgggcaggcaaccacgcaggttttgcagccaatgcagcgctcctgcatcacgtgcacaaagcctttctcgcgtttaatcgccccgttcgggcagacgttcgcgcacggagcgtcttcgcactggcgacagatggcggcggtggagatattcacgcctttgatgacgtggatgcgcggcaggaaggtgtcaggggtgagcgacgcacagtcctgctccgcctgatgggaaaccacgcacgccacttcacaggtacggcaaccaatacacttactggcatcggccataataaaacggttcatctgcttctccagcattacagttatgcgcggagatattcataaaccgtgccaataattaactcattgattttatagaactttaaaaatcgcagcggcgctgtcatcgtcacttatgacgatgacagctgtcgacatcagcggtgtgggccgtcaataaccgagtcgcgcaggacaagctcgccggagaaggtttgctgatatttaaactcgccgccgtcgagcatgaagatcaggcggctgatggtctcctgaatcatctccgttaccggaatgcgtacgctggagagcgacggcacgatgtagggcgcgatggccacatcgtcgaaaccgatcaccgacaccgcgtccggcgtggccacgccgctgtcgtgcagctgcttcagggcaccgatggccatatcgtcattgctcgccaccagcgccgtaaagcgctcaccgcgcgcaagcaggtcggacaccgccgccgcgccgctggcggggttccacttcccctgcgcgatcagcccctcgcgcagcggaataccatgctgcgccagcgcgtccttgtagccggagagacgctcgaccccggtgggggaatccatcgagccggtgataaaggcgatctcccgatgccctttcgcaatcagctgtgacaccgcgtcctggctggaggctttatgatcggaccagacgctgtggctgctgtttttccgcaggcggcggttgagcaccataatgggctgctcgcacttctcgacgatcgcatccatctcatccacgctcagaaaacgcggatagatgatcaccgcgtcgcagcgcatatccagcagatactggatcgcctcgcgctcctcatcggcgctgtgcttgccgtccgcgaggatcagctgtcgccctttctcttcggtcatgcgcgcggcgtgaaacagcagttcgctaaagtagacgccgtgataaagggtgttcgtcaccaccaggcccagcgtctgggtgcgtttggtcgccaggttgcgcgccagcaaatttgggcgatagccgctctcttcaatggcctgaaacacccggtctttggtctcctggctgacgtagccattacccgacagcacccgggacaccgtcgctttcgaaacgcctgcccgcttcgccacttccagcatcgtggtcatgttttttttccatccgaaactcatgcgggcagtgtactgcactgcagaaaaattgtcgcagcggcgacatcacgctttcggcacctcattgcgacattcatcacgaaactaaaaaatggtcaaaaagcgatcttgtttcattcataaaaactcatgatgattatgtggaaccggtttcctacatttcacacaacgataacaggatcacatccgatggccaaaaattacgctgcgctggcgaacgacgttatcagcgcgctgggcggcaaagagaacatcgtcgccgtcacccactgcatgacgcgactgcgtttcgttctgaaagacgaaaccctcaccgacgccgcgcgcctgaaaagcatcagcggcgtgctcggcgtggtgcgtaacgacaaccagtgccaggtgattattggcaataccgtctctcaggcgtaccgcgaggtggtaagcctgctgcccgctgacctgcagcccgcggtgccggaaggcccgcaaaagctgacgttacgccgcattggcgccgggatcctcgacgcgctgatcggcaccatgtccccgctgatcccggcgatcatcggcggctcgatggtcaagctgctggcgatgatcctcgagatgaccggcgtgctgcccaaaggcgcaccgacgctcaccattttgaccgtcatcggcgacggcgcgttcttcttcctgccgctgatggtggcggcctcggcggcggtgaaattcaaaaccaacatgtcgctggcgatagccattgcgggcgtgctggtgcacccgagctttatcgagctgatggcgaaagccgcgcagggcgagcacgttgagttcgcctttatcccggtgacggcggtgaaatacacctacaccgtcatccccgcgctggtgatgacctggtgcctgtcgtacatcgaacgctgggtggatcgcatcaccccggcggtgacgaaaaacttcctcaagccgatgctgatcgtgctgattgccgccccgctcgccatcgtgctgattggcccgctggggatctggatcggtagcgccatctccgcgctggtctacaccattcacggctacctgggctggctctccgtggcgatcatgggcgcattgtggccgctgctggtgatgaccgggatgcaccgcgtctttacgccgaccatcattcagaccattgccgaaacgggcaaggaagggatggtgatgccgtcggaaattggcgccaacctgtcgctcggcggttcgtcgctggcggtggcgtggaaaacgaaaaacccggagctgcgccagacggcgctggcggcggcggcctccgccatcatggcggggatctctgatccggccctgtacggcgtcgcgatccgtctgaaacgcccgctgattgccagcctgatcagcggctttatctgcggcgcggtggcgggcatagccggtcttgccagccattcgatggcggcaccggggctgttcaccagcgtgcagttcttcgacccggccaacccgatgaccatcgtctgggtgtttggcgtgatgggtctggcagtggtgctgtcgtttattctgaccctgatactgggctttgaggatattccggtcgaagacgaggctgaaaaagcgcgcgccctgcagaccgcaccggtacagaacaacgcagcaaaagcataaattgaaagcgaggtaagaatgtctgtttttccacaaggatttttatggggcggcgcgcttgccgccaaccagagcgaaggggcttaccgtgaaggcggcaaagggctgacgacggtcgatatgatcccccacggcgcgaatcgcctggcagtgaagctcggtaaggaaaagcgtttctcgctgcgtgacgacgagttctacccgagccacgaggcgattgatttttaccatcgctataaagaggacatcgccctgatggcggagatgggctttacggtgttccgcacctcgatcgcctggagccgcctctatccgaacggcgacgagccgctgccgaacaaagaaggcattgccttttaccgcgcggtgttcgaggagtgcaaaaagtacaacatcgagccgctggtgaccctctgccactttgacgtgccgatgcacctggtgacggagtacggctcctggcgcaaccgcaagatggtcgatttcttcgcccgctacgcccgcacctgctttgaagaatttaacgggctggtgaaatactggcttaccttcaacgaaatcaacatcatgctgcacagcccgttctccggggcgggactggtgtttgaggaaggcgaaaacgaagaccaggtgaaataccaggccgcgcaccacgagctggtggcgagcgcgctggcgaccaaaattgcccacgaggtaaacccggaaaaccaggtcggctgcatgctggcgggcggtaacttctacccctactcctgcaagccggaagacgtgtggatggcgctggaaaaagaccgcgagaacctgttctttatcgacgtgcaggcgcgcggaagctacccggcctactctgcccgcgtgttccgcgagaaaggcgtcgtgattgttaaagatccgggcgatgacgaactgctgaaaaataccgtcgattttgtctcgtttagctactacgcctcgcgctgcgcctcggcggacatgaacgcgggcaacaccagcgcggcgaacatcgtgaagtccctgcgcaacccgcacatccaggtaagcgaatggggctggggcatcgacccgctcgggctgcgcatcaccatgaacatgatgtacgaccgctaccagaagccgctgttcctggtggaaaacggcctcggcgcgaaggacgtcatcgatgaaaacggcgagatcaacgacgactaccgcatcagctacctgcgcgagcatatccgcgcaatgggcgacgcgattgaggacggcgtgccgctgatgggctacaccacctggggctgcattgacctggtctcggcctcgacgggggagatgagcaagcgctacgggtttgtgtacgtcgaccgcgacgacgccgggaacggcacgctggagcgcaaacgcaagaaatcgttcggatggtataagaaggtgattgcgagtaacggggcggatctcgagtagcctgttttgccgggtggcggcttcgccttacccggcctacaaaaccgtaggcccggtaagcgtagcgccaccgggcgctgctcagagctgagaaaaccctccgttcccaacccatccggcaagccgtgaatacaccacctccaccgcctctttcaccggcggcgtcatcgggtaataaaacccgacaatatccggctgaatgcccaaaaacagcacctcgcccacgtcacctttgatctgatccacgaggtagttcagcggcatattgtgggtggtcatcataaacatctcggcgatgtcgtccgggtcaatcaggcggatctcgccggggttgagccccatatcggtggcatcgacgattaacagcctgtccgggcgcagctcgcggatggccaccacgtcgttttccggcgcgctgccgccgtcaatcaccacccagtcgccctgcgggttggcggcacacatctctgcgagcagcggacccgcgccgtcgtcgcccatcatgctgttgccgacacacagtaaaacgtcagtcacgtaatctcctcaccatcaggtagatggcgctctcctgatgaatatcatgcagcatgccgagcagcgttttgctccacgcctgctgctcgggggtttgcctgcccagcgccgcgtcaaaggcgttggcgagcatggcaatgtggttcacatcgatcacgatctcgccgtacttcggcacaccttccattttgcgccgcgccgtgctgccctcctccagcgtggcaatccacgccaggtattccggccaggggcagctcagcgcagcctccaggcagtcaattaccccgaggtgatgcccaatcgccaggctgtaatagaccacctgctgcgccgcatccggcgtggcatcgttctcatcaataaacttacggctcagctggctgaacaccaccgtttcactcatcggatacgcgcctcgtcgacgatgctgttcaggttcgccacaatctcattgaggcgcggatcgttttccgcctccagccagcgtgcgacctggtggtcaccctggctcagcaggcgcagatagtcgtcggcaatctggcgcccgtagcggtaccccgccagcctgcgcgccgtgcggtcaaccttcacccgcagcggctgcaccatgtccgggtgcagaatggcggccggctggttgtcgagttcgcccggctcgcgggcgtggattttctgctccagcaggccgagcgccatcgcgaagccgtacagcgtggcggcgggcgtcggcgggcagcccggaatgtagacgtccaccggcacgattttgtcggtgccgccccagacgcagtagaggtcatggaagatgccgccgctgttgccgcaggcgccgtacgagatgcagattttcgggtccggcgcggactgccaggcgcgcagcgcgggcgagcgcattgcgcgggtgacggccccggtgaacagcaggatgtccgcatgacgcggggacggcaccactttgatgccgaagcgctcggcgtcaaacagcggcgacagcgtagcgaagatctcaatctcgcagccgttgcagccgccgcagtccacgcggtagacgtaggccgagcgtttgatttttttcagcagcgacgccttcatgctggcgatggattcatccaccgtcatcggcaccggaatgccgttcgcgtcgcgcgggcccagtaggttttccatcagctggcctctctcatgtggcgggtgatatcaatgcggtcggacggcagcaggcacttctgtcgcttgcacgccgggcaggtttcgaagctttcgcggtggtgttccgcgcgcgcgtcgccgttgtgctgcagcagcgcgatggcgtaatcgatctctttttgcacggcgaacgggcgctggcagacccggcagtggcacaggtcaaagcgcgactgctgcaggaaatcctctttcttccacaccgccagctcgtactcctgagacaggcgaatggcgaccgtcgggcagacctcctcacagcggccgcagaagatgcagcgtccaaggttaaactgccaggccagctcgccggttttgagatccgtttccaccgtcagggcattcgacggacaggcgttgaggcaggccgcgcagccgatgcactgctgcgggttgtgctccggcttgccgcgaaagtttttgtcgaccggcatcggctccagcggatagcggctggtctgcgtgccggttttgatcacttttttgataaaggtaaacatgacgaatccttatttcagcggcgagttcttacgctcgatgctgtagcgctcaagctctttgtacggcaccacctggcttttcttcttgcgcacgtccacgacggtcatgcggtcggtgcaggagtagcacgggtcgaggctgccgatgatcagcggcgcgtcggagaccgtgttgccgcgcagcatatagcgcagggttggccagttggcgtaggtcgccgcacggcagcgccagcggtaaagcttctggttgtcgccggtcatgctccagtggatgtcgtccccgcgcggcgcttcggcaaagccgagggcaaagcggtttggaatgtaggtgaagccttccaccatcagcgggccgcccggcaggttgtccagaccaaagtcgatcatgttcagcgcggtgaacacctcgttgatgcgcaccttcaggcgggaaatgacgtcgcagccctgctcgctgtgcacggtcatcggcagcaggccatagccgacgaacgggtgatcggcgcgggtgtcgcgggcgtggccgctggcgcgcaccatcgggccgacgttgctgaagtcgcgggcaatctccgggtcaagacggccaatgccgacggtgcgctgctcgatgttgggcgtgctgagcagcatatccaccagctcctgcacgtcccggcgcatctgctgcgccagctggcgggtctggatcatgtcgtttttcagcaggtcgcggcggatcccgccgatcaggttcagaccgtaggttttgcgcgccccggtgaggatctccgccatcttcatcgacgcttcgcgcacgcggaagaactgcataaacccggagtcaaagccgacgaagtggcaggccaggccgaggttcagcaggtgcgagtgcaggcgctccacctccagcaggatggcgcggatcatctgcgcgcgttccggcaccacgatccccatgccgttctctaccgaggtggtgtaggcggtgctgtgggcgaagccgcagatgccgcacacgcggtcagagaggaacgtgacttcgttgtagcccatgcgggtttccgccagcttttccatgccgcggtggacgtagaacaggcggtagtcggcgtcgataatgttttcgccgtcaacgaacaggcggaagtggcccggctcgtcagaggtgacgtgcagcgggccgatcggcaccacgttattcttcttgctgcccagctcgttgatgaactcgtaggtttcgctgtcggtagtcggcgccgggcgctggcggtagtccatgctgtctttgcgcagcggatagagttcgtcaggccagtcgtccggcagcaccagacggcgctcgtccggcaggccaaccggcaccaggccatacatgtcgcgcacttcgcgctcgccccagacggcggcgggcacgcgcggcgtgacggacgggtattccggtttattcgggtcgacctcgacgcgcacggtgatccagcacttctcgccctgctccatcgacatcacgtagtacaccgcgtaactgccgcacagctggcgctcgtcgttaccgaacagcaccgacagccagccgccctgccggtagtagagaaactccaccacttccggcagatagttcaccttaatggtgacggtgatctggtctttggtttgccaggactcctccagcaccacgctcgggaaagcctgatgcaacgcggcgagatactgctgacctttcttttcttcagacataaatactctctttaatcacgccaccagcaaggagacgaacgctaaaaatgcaaaaccaaacccggcccaggtgatgcgggacgtttccacaaaacgcaggcgcgccatgctgttttcgaacagggcaatgaccagcacgccgaccagcagcttgagggcggcaaccacgacggccagcagcagtccacccgcagagaagtgcgtcatctgcccccacgggaagaagacgccgacaaacatctgcagcaccaccagctgtttgaggctgatgccccacttcagcaccgcaaagccgtagccgctgtattcggtgagcggcccttcctgcagctcctgctcggcttcggccagatcgaacggcagcttgcccatctcgataaacgtggcgaacgcgcaggcgcacagcgccagcaccagcggaagggagcgggcaaccggccagtgataaacggtgtcggtgataaagctgatgtgcgtggaacccgcaacctgcgcggcgacccacagccccagcagcaggatcggctcaaccagcacgccgagcatcgcctcgcggctggcaccgatgccggtaaacgggctaccggtgtccaggcccgcaatcgcaaagaagaagcgggcgatggcgaagaggtagataagggtaatcagatcgccaagcacgggcaggggcgaagccaccgtcaccaccggcagcgcggtggcgacggtgagcatcacgcccaccatcacaaacggcgtcaggcggaagacccagcctgcggcatccggggccacgctctggcgagaaagcagcttgaagagatcgcggtactcctgcagtacgccaggcccacgacggttgtgcatccgggcgcgcgccacgcgcgtgatgcccgacagcagcggcgcggcggcgaacagcaccagcgcctgaagaattgccagtaacagactcatgtcaggctcctcgtgaaatcacaatcactaccagcaccgccagctcgatcaacgccagacggcggaacagcgcgggcgcggcagcgttctgccagccgggtacccagcccaccgggttcagccagtggcgcagcttcagcacggcggcgaagttctctttcaccggcatagcaaaaccgtgggcggtgatgaccatcgactgttcgtgttcataaccgcaggcccacgcggcaccgcgcgagcgggaggtgagccggtcgcgtttgaagaacagcatcagcacgaacggcagcagcggcgcggcaatcagcagcagtgcaatcatcggctgggaaacgacggtgtgcgccgtctcaagcggcagcggaatggcgtgacccagcagcggcagcagccacggcgcggcaaccccgcccgcgatgcagcacagcgccagcgcgaccacgcttacgcccatcagtaccggtgcgcagcaggcgttctcagcctcacgcgtacgcggcgcgccaaggaaggtcacgccatagactttcgccatgcacatcacggccagcgccccggtaatcgccagcccgaccgccagcagcggccccagcaggcgggcgataaacgcctcgctctgaccgagggcgaagaaggactgatagatcacccactccccggcaaagccgttcagcggcggcagcgcggccatcgccatcagcccgaccagcatcgccagcgaaatcaccggcatttttttgccaatcccaccgagcttttcgatatcccgatggccggtgcggaaccagacgctgcccgccccgaggaacagggtgcttttaaacaggctgtggttgatcaggtgatacaaaccgccgataaagccggcggcaatcagcgccggttgattaagcgccagcccggtcacccccgcgcccatgccgagcaggatgatgccgatattctccagcgtgtggtacgccagaagacgctggatattgtgctccatcagcgcgtacaggccgccgatgaaggcggtgatcatgcccgcaatcagcagcaccacgccccaccacagcggcggctggccgccggtcagcgtcatcgccagaatcccgaacagaccgaccttcatcaccaccacagaaaacagcgcggcagcgggcgcggaggcattcgcatgcgcctgcggcacccagccgtgcagcgggataatcccggccagcaggccaaagccgatcacgcccagcagccagacgtcattgcccagcggatgcccgttaagcgcagcgaactccagcgtgccgaaacgctgccacacccgccagcaggccagcgccagcagcagcgtcccgaggcgtcccagcgcaaaccacactttcccggaggcgctgcagccggtcaggaacacgccgcagagcgccatgatctccgccatcaccaccagcgcgccgaggttgctggcgatcacggtgcagaccgccgtcgccatcagcaggttcaccagcaggccgttggctttggcgtgcggatggcggtgccagtcgatattgaacaggctgataaacagcccgcacaggccaaaggtcaccagccagatggcgttcagcggcgtaatcgcaacggtgtggcgaatcagcggcatcacggcctctgcggactgcccgccgagcaggacaaccccacccgccgccagcgtcatcaggctgccgaccgccccgccgatcccggcgatccagccgctcagggttttatggaatgacagaagccacgccagcacggcggcggcggcaaagtacgccacggcgctggtaatcatcgtaatcgcgttcatttcaccccctcgttgagcgcctgcagaagcgaaagatcgccgacgtcggtattaatggtcagctcgcgcttgcgcttgctagtgcgggcgatgtcgcgaatgttcaccagaatcagcgctttggttggacaggtgcgcacgcaggccgggccctgttcatcgaagctgcacaggtcgcacttcaccgccacggcgcggatgccgggcacccagtccagcagcgtgctgacgcgtgcaggcgccggaggcgcgggcggggctttaggcgagttggcattggccggaatatgcagcgggcggctgccggagaattcaatcgcgccgaacgggcaggcaatgccgcacagcttgcagcttacgcacaggctttcgttcagctggactgcgccatccacgcgggtgatggcgttcacaggacagacacccgcgcagggggcatcttcacagtgatggcagagctgcggggcagactctttttcattacgcatgacgtgcaggcgcggcatggactgtagcccatgcaggcgatgcgtttccgaacacgccgcctcacaggttcgacagccaatacagaccgtcgagtcagcaattacaaaacggttcaccgggttatcctctggtgatagtcatttttgacgaaaaactgtcttgtcgacacttctcgacacactgggggtcaggccacgttcgctgaggtatttccgtccatcagctgcttcaggttgaccgggagatcgtgttcaacggcggtgtacaggccgttataaaccggggcgattttttccagatagtgctccagtacctgctggcgatcgcggttgctgacgtggccgtccaccatgccgtcagccatcagctgcgcctttgcaatacactgtttttcaccgtcttttgtctcgaggtggtactcgatggtgtggctattgaagttatccgccagggtgacgttgatgatgaaatggccgaagaggacaaagcgcatatccccctgcgccgcgcagctcatcgcgtggtgaagacgcgctttcgacaaggtaatgccctgaaccagcgagttgcagtaaaggtgccactggtcctgtaactgttgatgacgctgcgcgatgtattccgctttttcgctgatttcccaaatagtcatagaaggtatccgtttaatggagatagcggctgttaagcagattccatgccagtttttatgtttatgattttcaatggatttaattaaaaattcgctgtcaacatcgcggtgtcgacgtgtcatttcgacagcggtgacatcgacacgccttaacaaaaatcaagctggcactgttattgcattaccggggcaattcattgaggaggcgtcatgcacgaaattaccctctgccagcgggctctggaacttatcgaacagcaggcagtgcaaaaccacgcgaagcgcgtcaccggcgtctggctgaaggtcggagcgttttcctgcgtcgagaccagcgccctgaccttctgttttgagctggtctgccgcggcacgctggcggaaggctgcgaactgcatattgaggagcagcaggcggagtgctggtgcgagcagtgtcagcagtacgtcaccctgctctcatcgaaggtacagcgctgtccgcagtgtcagagcggcggtctgcacatcgtggcggatgacggcatgcagatccaacgcctcgaaatcgagaaggagtaaagtatgtgtagtacctgcggttgcgccgaaggcaacctgtatatagaaggggatgagcaccgtccccactccgcgtttcgctccgcgcccttttcccctgccccgcgccctgcggcagccctgaccggcattacctttgcgccgcagcgttccgacgcgggcgacctgcattacggccacggcgaagcgggtacccacgcgccgggcatgagccagcgccagatgctggacgtggaaatcaacgtgctggacaaaaataaccagatcgccgcccgcaaccgcgcccgctttgccgtccgcacacagctggtgctgaacctggtctccagccccggttccggtaaaaccacgctgctgaccgaaacgctcaaacgcctcaacgggcgcgtctcctgcgcggtgatcgagggcgaccagcaaacggtaaacgacgcggcgcgcatccgcgaaaccggcaccccggcaattcaggttaacaccggcaaaggctgccacctggatgcgcagatgattgccgacgccgccccgcgcctgccgctggcggataacggcatcctgtttattgaaaacgtcggcaacctggtctgcccggcgagcttcgatctgggtgaacgacacaaggtggcggtgctttcggtgaccgagggcgaagacaagccgctgaaatacccccacatgttcgccgcggcatccctgatgctgctgaacaaagtcgacctgctgccgtacctgaatttcgacgtggataagtgcctggcgtatgcccgcgaagtgaacccggagattgagatcctgctggtctccgcgacgcgcggcgacggcatggacggctggttacgctggctggagaacgaacgatgtgcataggcgtaccgggacaaatccattccctcaacggtaatcaggccaaagtcgaggtctgcggcatcctgcgcgatgtagacctgacgctggtgggcagcaccgatgaaacgggcgcgtcgcgtctcggccagtgggtgctggtccacgtggggtttgccatgagcgtgattaacgaagcggaagcccgcgacacgctggatgcgttgcaaaacatgttcgacgtggagccggacgtcggcgcgctgctgtatggcgaggagcggtaatcatgcgttacgttgatgaataccgcgcgccggagcaggtgctgcagcttatcggacacctcaaaacgcgcgcggcgcggctggactacaccaaagaaaggccgctgcggatcatggaggtgtgcggcgggcacacgcacgcgatcttcaagtttggcctcgaccagctgctgccggagaacattgagtttatccacggccccggctgcccggtctgcgtgctgccaatgggacgcatcgacagctgtatcgagattgccagccagcccgacgtcatattctgcacctttggcgacgcgatgcgcgtgccggggaaaaacggctcgctgctgcaggcgaaagcgcgcggggccgacatccggatcgtctattcgccgatggatgccctgacgctggcagcggataaccccgcgcgcaaggtggtattttttggcctggggtttgaaaccaccatgcccgcgacggccatcacgctgcagcaggcgaaagcgcgcggcgtcgataactttttcttcttctgccagcacattacgcttatccccaccctgcgcagcctgctggaagcgccaggcaacggcattgacgcctttctggcaccgggccacgtcagcatggtgattggcacagacgcctacggttttatcgctgaacagtacaatcgtccgttagtggtggctggtttcgaaccacttgatctactgcaaggtgtcaccatgctggttgagcagaaaatagcggccctgagcgcggtcgaaaaccagtaccgccgcgtggtgccggatgccggcaatgaacgggctcagcgtgccattgcggaggtgttcagcgtcgaaggcgacagcgagtggcgaggactggggctgattgctgaatccggcgtgcgcctgacgccagcctatcgcgcgttcgacgccgaagcgcatttccgcccgcagccgcagcaggtttgcgacgatccccgggcccgctgtggcgaggtgctcaccggcaaatgcaaaccgcatcagtgcccgttatttggcaatacctgtaacccgcaaacggcgtttggcgcgctgatggtctcctccgaaggggcatgcgccgcgtggtatcaatatcgcaaccaggagtgtgaagcatgaacacggtggaaatggcgcacggaagcggtggacaggcgatgcagcagctgattaaccggctgttcatggaggcctttaacaacccctggctcgccgagcaggaagaccaggcgcgcattgatctcgccaccctcaccgccctgggcaaccggctggccttctccaccgacagctatgtcatcgatccgctgttctttcccggcggcgatatcggcaagctcgccgtctgcggcacggccaacgacgtggccgtcagcggcgccattccccgctacctctcctgcggattcatcctcgaagaggggctgccgatggagacgctcacggcggtggtgaacagcatggcacacaccgcgcgcgaggcgggtatcgctatcgtcaccggggacaccaaagtggtccagcgcggtgcggccgataagctgtttatcaacaccgccggaatgggggctatccccgccaacattcactggggcgcacagcggcttagcgcgggcgacgtgctgctggtaaccggcacgctgggctgccacggagcgactatccttaacctgcgtgaaggcttagggctggacggtgaactgcgcagcgactgcgcggtgctcaccccgctgattcagacgctgtgtgctattcccggcgtgaaggccttgcgcgatgccacccgcggcggggtgaatgcggtggttcacgaattcgccgcaagcagcgggtgcgggattgaactgaccgagcgtggcctgcctgtaaaagctgccgtgcgcgggctgtgcgaactattgggacttgacccactgaactttgctaacgaaggcaagctggtgatcggcgtggaacgcgcggcggcggaagccgttcttgcagagctgcgcgcgcatccattagggaaagaggccgccatcatcggcgaagtggttgagcgcaagggggtgcgcctgaccggactttacggcgtgaagcgcacgctggacctgccgcacgcggaaccgttaccccgaatttgctagagccgcgccataagcggtcagcactgaatgtctcttttttgccagtttctattggaaagcaataatgccgtatacaccgatgagcgatcttggacagcagggcctgtttgatatcacgcgcacacttttacagcagcccgatctcggcgcgctgagcgatgccctgacgcggctggtcaggcaatcagcgctggccgacagcgcggcgattgtactgtggcatagcggaacgcaccgcgcgagctactactcaacgcgcgataatggcaaaacgtttgagtacgaagacgaaacgtatctcgcgcatggcccggtgcgccgtattctctcccgtccggaagcgctgcactgcaactttgaggagttccgcacggcgtggccgcggctcgcggagagcaacctctaccagccgttcggccactacagcatgctgccactcgcggcggagggacatatttttggtggctgcgagtttattcgcacgaccgaccagccctggagcgagtcggaatacgagcgtctgcacacctttacccagatcgtggccgtcgtcgcggagcagatccaaagccgcgtgaccaataacgtggattacgacctgctgagccgcgagcgcgacaacttccgcattctggtcgccatcaccaacgccgtgctgtcgcgccttgatatggacgagctggtcagcgaagtctcgaaggagatccaccactatttcaaaatcgatgctatcagcatcgcgctgcgcggccatcgcaagggcaagctgaacatctactccacgcattatctggatgaagccaacccggcgcacgagcagagcgaagtggacgaagcgggcaccctgtctgagcgggtgtttaagagcaaagagatcctgctgctcaacctgagcgagcaggacccggtggcaccgtatgagcggatgctgtttaacacctggggcaacaagattcagaccctgtgcctgcttcccctgatgtccggcaacaccatgctgggggtgctgaagctggcgcagtgtgatgaagccgtgtttaccaccgccaacctgaagctgctgcgccagatcgccgagcgtatctccatcgcgctggataacgccctcgcctatcaggagatccaccgcctgaaagagcggctggtggatgagaacctggccctgaccgagcagctcaacaacgtggacagcgagtttggtgaaatcatcgggcgcagcgacgccatgtacagcgtgctcaagcaggttgagatggtggcgcaaagcgacagcacggtgctgatcctgggcgaaaccggtacgggtaaagagctgattgcccgggccatccacaacctgagcaaccgcaacagccgtcggatggtgaagatgaactgcgcggcgatgcccgcaggcctgctggaaagcgacctgttcggccacgagcgcggtgcattcaccggggccagcagccagcggctgggccgttttgagctggcggacaagagctcgctgtttctcgacgaagtgggcgatatgccgctggagctacagccgaaactgctgcgcgttctgcaggagcaggagtttgaacgtcttggcagcaacaagcttatccagactgacgtgcggctgattgccgccaccaaccgcgacctgaaaaaaatggtcgccgaccgcgagtttcgcagcgatctctactatcgcctgaacgtcttcccgatcttcctgccgccgctgcgcgagcgcccggaagatattcccctgctggtcaaagcgtttaccgccaagatcgcgcgtcggatggggcgaaacatcgacagcattcctgccgagacgttacgtaccctttcatcaatggagtggcccggcaacgtgcgcgagctggaaaacgtcatcgagcgtgcggtgctgctgacgcgcggcaatgtgctgcagctctccctgcctgaagtgacgctgcctgacgtgaccgtacccgccgccgagacggcgaaagagggagaagatgaatatcagcttattatgcgcgtactcaaagagaccaacggcgtggtcgccgggccaaaaggtgccgcccagcgtttagggttaaaacgcactaccctgctgtcgcgcatgaagcgtctcgggatcgacaaagagagcctggtttaagcccccaatccggcggtgtttttctggcaccgcctttcgttaccctgcgcaattgtccctcattgacacaaaatcgtttcctctgtataaaattccgccttaataatgagtttcatttgcatcaataataatattaatcaagggtagcgtttcatgaagaaggtcatctgcgcgttaggcctggcggttgcgtcggtcagttctgctctggcaaccacatatcctctgacgattgaaaactgtggctataaagagacattcaccaaagcgccggaacgcgtcgtggctctgggtcagaataccgtcgaaattctgctcctgctggggctggaagataaggtgaaggccagcgccttctggccgacgaaagtgctgccgcagctggcggaccagaacgcaaaaatcaaaaccctgacggtcgaaatccctacccttgaatccgtgcttgcgcaaaatcccgactttgtccccgcgcagtcaccgctgctgctggggccagaaagcaaggtcgcaaaacgcgacgatctgatgaccctgggcgtgaacagctacgtgtccccgggcatgtgtgcgaccaaaaaagccaccggcgatatgtacggcagccgccagaaactgtgggatatgacgtatctctatcaggagattgaggatttcgccaaaatctttaacgttgaagaccgcggtcaggccgtgattgccgatttcaaaaaacgtgaggccgacttgcgtaaggaattcggcaagaacaaaaaagatctctcctttgttttctggttctccagctcatccccctctgcggacgcctacgtaggcggtaaaaatagcccctccgggtttatcgccagcctgatgggcgggcataacgccatcacctccgagaccgaatggccaaccgtgggctgggaaagcattattgccgccaatccggatgtgattgtggtctcgagcctggatcgcaaccgctgggcgctggataacgcggaagagaaaatcaaattcctgaaaagcgatccggccgtcagccagctggacgcggtgaaaaaaggccatatcgtggtgatggacggtcaggccatgaacccgacgattcgcacgatttacggggctgagcaggttggcgaacagctcagaaaactggggctgaactgatgaccaccgctgtccttcaggccaggcagagcctggttctgacgacctcgtgtttgctcgcctttgtcctgctatttctggttatcgcgctgagcgtcagcgtcggcgagctgtccatcccgctggataacgtgttttacgccatcagcaataaaatggggctcaccgatgttccgctcactcgcatctatgagagcgtgatctgggacttccgcctgagccgcgcgctggtggcggcctgctgcggcgcaggtctggccatctgcggggccgtattgcagagcctgctgaagaacgcgctggcggaaccctacgtgctcggcgtgtccgcgggcgcatcgaccggggcggtttctgtcgtcgtgttggggatcggcaccggtgcggtgtcgctctctgccggggcctttgccggggcgttcgccgcgtttgcgtttgtcgcgtttctgacgaacggggcgcgcggcgggaatgaacgtacgattctggcaggcgtcgccgcctcacagctttttaacgccattaccgcctacaccattagcacctccgccagtgcccagcaggcgcgcgacgtgatgttctggctgctgggcagcttcagcggcgtacgctggcctgaattccagctggcactggtcgtggtgctgattgggttagccgtgtgcctctactattcccgggcgctggatgcctttacgttcggcgatgacgccgcggcgtcgctgggcattgcagtcccctgggtgcgcctggcgctctttaccaccaccgcgctgattaccgcaaccatcgtcagcatggcgggctcaatcggctttgtcgggctggtggtgccgcacgtcatgcgtttcctgttcgggccgctgcaccgcacgctgctgattgccagcgcgctggcaggcgcgatcctgatggtgctggcagacattgcctcgcgcatgctgattgcgccgcaaagcctgcccgtcggcgtggtcaccgcgctggttggcgttccgttctttgccgtgattatctaccgctcaaggaataagtgatgagcatctgcgctgaaaatattacctggaaggtcggcaaaaaagtcatcgttaatgacgtctcgctgaaggtatcccggggcgaaacggtaggactgcttggccctaacggctgcggtaaatcgtctcttttacgtatcctcgcggggctgcgtcgcccggatgcgggctgtgtgacgctggacggccaggacatctctcgtattgccaaaaagcagctggcccgccgggtcgccttcgtggagcagcacggcatgactgacgccaacatgcgcgtgcgcgacgtggtcaaacttgggcggattccgcaccactccgccttttccaactggagcacgcacgatgacgaaaccgtcaccgccgctctgcagcgcgtggatatgctggataaaagcgaccaggggtggctgagcctctccggcggtgagcgccagcgcgtccacattgcccgcgcgctggcccagaccccgacggaaatcctgctggatgaaccaacaaaccacctggacattcatcatcagatgcagctgatgcagttgatcagcgaattaccggtcaccagcattgtcgctatccacgatctcaaccacgcctcgatgttctgcgactcgctgattgtgatgcagaaaggccaaattgtggcgacggggacaccgcaggacatcctgtccgagtcgttgctctgggacgtcttccgggtcaaaaccaaaatcgagatctcgccgttccatggcaaaaaacacattcactttatcgtttaggggcgagtgaccaacgatgccccttcgccctgccaccacgctctggccccccgttttactgggtagccagtttgtttttaacatcggcttttacgccgttgtccccttcctggcgatattcctgcgcgacgatatgctgctctccggcgggctgatcgggctgatcctcggcctgcgcacgttctctcagcaggggatgtttatcgtcggcggcgcgctctcggaccggtttggcgcgaaaatcgttatcctgagcgggtgcattattcgcgtcgcggggtatctgctgctggcgcttggagaatcgctgtggccgattattctgggcgcgtgcctgacgggggtgggcggcgcgctgttttctccctctattgaggcattgctggcgaaagcaggcacgcacagcgaggcgaaaggtaaacgaagccgggcggagtggttcgcgctctttgcggtctgcggggaactcggtgcggtactgggcccggttgccggcgccctgctcaccggcctgggctttcgccaggtggcgctggcgggcgctggagtctttctcgttgcgctggtggttctctacttttgcctgcccgcgtcacgccacgccgcgcggacgctgaagctcgttccctggtggacgacgttccgccagccccgctttgtcgcctttatcattgcctatagctcgtggcttttaagctataaccagctctatctggcgctgccggtagagatccagcgcgccggcggtaacgagaaagatctcggcccgctttttatgctggcctctgtactgattgttgctttacagctgccgctggcgcgattcgcccggcgcgtgggcgcggtgaggatcctgccggtgggctttttattcctctccgccgcctttgcaagcgtggcaatgtttgcgccgacggcaccgcctgagggctggcttcgcctgctgccgtcggtctgtttcgtgacgctgttgacgctgggacagatgctgctggtaccctcagctaaggacctggtcccccggtttgccgaggagtccacgctgggggcgcactacggcgcactcgccaccgccggaggcattgcggtactggccggaaatttgctgtttggcagcctgctggatcgcgcgctggtgccctcaacgcaggcgatgctcccctggctgctgctggccctcttcccgctctgcagcgcgctggcccttaacgtgatttgccgcccgctcagaagctgaaccggtcactttttcggacgatacttttccggcagttccggtactggacgacggtcatccatcagatggcggacggtcagaatggggtgacgccagagcattcgcgggcctgcccagcgcataatctgcttcatctcttcgcgttttgcaggctggtagcagtggaccggacactgtttacaggcgggcttttcctccccgaaaacgcatttatccagacgcttatcggcataggcatttagcgcctgatagtgcccctcttccacagaggcttgaggacactgcttctgatacagcgcgatcattttcgcgatggtctctttttcgcgtgaaattcgtttaccggacatagcgacttaccgaacaataaagtgcaaaaataatacacctttcaatgcgggatttcagttattgcatgtcgttctctgaagcctgattccagttttagccctgcaaggcccaaccatcactggtattttatacaggcatcagtaatgacttttatccgtattgtcgggagaccctatgcaagaactcgctatcaacaaaccctatcgccatttaacagtgggatatttcagaaagcgccatgaagaccgcaataccaagataccgaagcgctacagcgtgcatgcggcgctgagcttaaaaggtgactggcttgaaaaggcagggtttaccacccactcccgggtgcgagtgggtgtggagcatggaaaaatcgtcattgagctcatgtcggaagatgcctcgtaaagcggcgacatttttctgcgccgtacctttttttcatgcgacaatagaaggaacaaacggccactgagccgctcaaaacggtttatattcaaagaaatggacatcataactccatgagcacactcgacaatttcgacgcacatacgccgatgatgcagcagtatctgaagctgaaggcacagcatccggaaatcctgctgttctatcgtatgggcgatttttacgagctgttttatgacgatgccaaacgcgcatcgcagctgctcgacatctcgctgaccaaacgtggcgcatcggctggtgaacccattccaatggccggtataccccaccacgcggtagaaaactacctggcgaaactggtgaatcagggtgagtctgttgccatctgtgaacagataggcgaccctgcgacctcaaaaggtccggttgagcgcaaggtcgtgcgcatcgtcacgccgggcaccatcagtgatgaagccctgcttcaggagcgccaggataacctgctggccgcgctctggcaggacggcaaagggtttggctacgcgacgctggacatcagctccgggcgttttcgtctgagtgaaccggctgaccgagaaacaatggcagccgaactgcagcgcaccaacccggcagaactgctctacgccgaagatttcgccgaaatgtcgctgattgaaggccgtcgcgggctgcgccgccgtccgctgtgggaattcgaaattgataccgctcgccagcagctgaatctgcagttcggcacccgcgatctgattggctttggcgttgaaaatgccccgcgcgggctgtgcgcggctggttgcctcctgcagtacgtaaaagatacccagcgcaccgccctgccgcacattcgctctattaccatggagcgccagcaggacagcatcatcatggatgccgccacgcgccgcaacctggagatcacgcagaacctggcgggcggcgtagaaaatacgctcgcgtcggtcctcgacagtacggtcacgccaatgggcagccgtatgctgaaacgctggctgcatatgccgattcgcgataccgctacgctggtttgccgtcagcagacgattgccgccctgcaggatcgctataccgagctgcagccggtcctgcgtcaggtgggcgatctggaacgtatcctggcccgtctggcgctgcgcacggcgcgaccgcgcgatctggcgcggatgcgtcatgctttccagcagctgccggaactgcgtgcgcagctgagcgacgttgacagcgcgccggtacagaaactccgcgaaaccatgggcgaatttaccgaactccgcgagctgcttgaacgcgccattattgatgcgcctccggttctcgtgcgtgatggcggcgtgattgccccgggctacaacgaggagctggacgaatggcgcgcgctggccgacggcgcgacggactaccttgataagctggaaatccgcgagcgcgagcgtcttgggctcgacaccctgaaagtggggtataacgcggttcacggttactacattcaaatcagccgcgggcagagccatctggcgccgattcactacgtgcgccgccagacgttgaaaaacgctgaacgctacatcattcccgagctgaaagagtacgaggacaaagttctcacctcgaaagggaaagcgttggcgctggaaaaacagctctatgaagagctgtttgacatgctgatgccgcacctggccgacctgcagctgagcgcaagcgcgctggcggaactggacgtgctggtgaacctggccgaacgcgcggaaacactgaactacacctgcccgacctttaccgacaagcccggcattcgcatcactgaaggccgtcacccggtggtcgagcgggtgctgaacgaaccgttcatcgccaacccgctgagcctgtcgccgcagcgaagaatgctgatcattaccggtccgaacatgggcggtaagagtacctatatgcgtcagaccgcgctgattgccctgcttgcctatatcggcagctacgtcccggcgcaaaacgtggagattggccccatcgaccgcatctttacccgcgtcggggctgcggacgatctggcgagcggtcgctcaaccttcatggtcgaaatgactgaaacggctaacattctgcataacgcgacggagcacagcctggtgctgatggacgaaatcggacgcggaacgtcaacctacgatggtctgtcgctggcctgggcctgtgcggaaagcctcgcgaataaaatcaaggccatgacgctgttcgccacccactacttcgagctgacgcagttgccggagaaaatggaaggcgtggctaacgtccaccttgatgcgctggagcacggcgacaccatcgcctttatgcacacggtgcaggatggcgcggcaagcaagagctatggtctggccgttgcggcgctggccggtgtaccgaaagaggtgatcaagcgcgcgcgtcagaaactgcgtgagctggaaagcctgtcaccgaatgcggcggcgacgcagatcgatggtacgcagatgtcgctgctggtgccagcggaagagacatcgcctgccgtggaagcgctggagaatctcgatccggattccctgacgccgcgtcaggcgctggagtggatttatcggttgaagagtctggtttagttctctgcggtctttgcccggtggcgctgcgcttaccgggcctacgaattttgtaggccgggtaaggcgaagtcgcacccggcaaaacagaccgcacgacgttatcgcccggtaagcgcagcgccaccgggcttttttttagagcagcggcgggattgtcggcacctgcggcgcctcgtcaatatccttctgcgtcatgcggaacgcttccgggtagtgctcgcggctggtacgacgcagcggttcggtatcgcgccaggtatacaggcaatgctggcactggtaaacggtccagacccctttcaccggtgacgtcgccatcacttcaatatgctcatcggcacaacgtggacaaatcatcttttcctccttattggcgtgcagccagcatcgcggtcagtttttcagcccaggctttggtttcgggaagatcctgaaccggctggctatagtggccccgggtgtccggtgcgacaggcgtggtcgcatcaataatcagtttgtcggtaatgcccgccggactggatcccggatcgagttcaagcaccgacatgttcggcagctgcaccagatcgcctgccgggttgaccttcgatgacagcgcccacatcacctgcggaaggttgaacgggtcgacatcctcatccaccatgatcaccatcttcacgtagcccaggccgtgcggcgtggtcatggcgcgcaagccaaccgcgcgggcgaagccgccgtaacgctttttggtggagatgatcgccagcagaccgtgggtgtacatcgcgtttaccgcctgcacttccgggaactccgctttcagctgctggtagagcggcacgcaggtggctggccccatcagataatcaatctcggtccacggcatgccgaggtaaagggattcgaaaatcggtttggtgcggtaagaaactttgtcgatacgcacaaccgtcatgttacggccaccggagtagtggccggtaaactcgccgaacggcccttcaatttcgcgcttacggccttcaatcaccccttccaggatcacttcagaaccccacggcacgtcgaagccggtcagcggcgcggtggcaatcgggtacgggctttcacggagcgcgccggccatttcatattccgactgatcgtatttcagcggcgtcgcgcccatcagggtgatgatcgggtcgttgcccagcgtaatcgcaatcggcaggtcttcgccgcgctcttccgctttgtgcagatgcagggcgatatcgtgcatcggcaccggctgcaggccgagcttgcgcttgcccttcacttccatgcggtagatgccaacgttctgcttgccgaagttatccgggtcgagcggatcgcgcgagacaacacacgctttgtcgagataaaaaccaccgtccccgtcgttcaggcggaacagcggcaggatgtcgaacaggttaatgtcttcaccgtccaccgtattctgcgcccaggccgggttggcgcggcgctctggcgcaatcgggaatttatcccagcggcgaataaactcgtcgatctgctttttcaccggcgtgttcgcaggcagccccatcgaaatagcgtgattttgccaggagccgatggtgttcatcaccacgcgggcatcggtaaagccgcgaatgttgtcgaaccacagcgcgggtgcgccgtcaccgatgcggccggtcgcgttggctgccgccgccagatccggctcggcgtttacctcttcctcaattttcagcagttgcccttgctcatcgagcgcctgcaggaagcttctcagatcatcaaatgccatctttattctcctgtgaaaaatgtttcgcctcccgcaacccgttccagcggcgcgcctttttatgctccaggccaaactggtcgagcacgcgggtcacaatatgctgggtaatgtcatcggcggtttgcgggtggttgtagtacgcaggcatgggcggcaccatcgccacgcccatgcgggagagcgccagcatgttctccagatgaatggtgctgagcggcgtttcacggggcaccagcaccagcttacgcccctctttagtaccacatccgccgcacggcccaccagcccttcggcatagcccgcgcggatcccggccagcgttttcatgctgcagggaatgacgatcatgccgtcggtacgaaacgagccggaggagatggtggcggcctggtcagccgggctgtggacgacgtcagccagggcagcaacatcctgggcggtgtaaggcgtttccagctcaatggtggtttttgcccacttcgacatcaccagatgcgtctctacttccggcatttcccgcagcgcctgcagcagcgccacgcccagcggagcacccgtcgcccccgtcattcccacgatcaatctcattcatcacctcaatcaatttgttcgtgtacgaacattgtaggtaaactactcccggattgtttctctgacaagattgttcgtacacgatcacacaaaatgctaaaaaatgccgcattatcatcctggactttagcggctatcatagggggtgattttttctgtcggagtgttcatggaactaagacaagaggcgttccacctgttacgtcagctttttcaacagcataccgcgaagtggcaacatgccctgccggaactgaccaagccgcagtatgcggtgatgcgctcgattgccgagcatccgggcattgaacaggtggcattgactgaagtcgcggtcagcacgaaagcgaccctggcggaaatgctgagccgcatggaggcgcgcgggctggtcaaacgcgagcacgaccctgcggataagcgccgtcgctttgtcttcctcacgccagaaggtgaggccctgcttgcagactgtaagccggtaggcaatgaggttgatgaggcctttttaggacgccttaacaaggccgagcgggagcagttctctgcgctcatcaaaaagatgatgcacgattaactcacgctggtgcgcataaaatcgataaaggtgcgcacttttgcgggcacatgccgggcatcaggatagaccgcataaatcccctgccgcgcaaaggtatactccggtaaaatcgtcaccagcgttcccgcatcaagcgcatcgcgcaccagccattccggcagtaacgccaccccaccgcctgcgagcgcaaaagccataagggcctgagcgctgtcggcaaacaaacgcggcgccttttttatctccagcatgtcaggcgcaccgcgggcatctttcacctgccagcgcagcggcgaggctaagcgctcgtggataatccagtcggcctgcgccagctgcgcaagcgattcgatcgggtttctcgcaagccactcgggcgtcgcgacggggagaatagaaaagtgagaaatcagtgcggcgtggttgcgcgaatcaacaagcgtccccagccggatggccacgtcaaagcgctccgagataaggtctgcgtgcagtgacgacgaaacatgtcggacgcgaagatccgtgtgctgctggctaaacctggccagcagcggcaccacgacccgggcgccatattcaggcgtggtcgtgatccgcagttcgccggtgagccccgcatggttcgcgcggacatcatcctgcagccgttcggcctccttcagaagcgccacgctgcgctgatgaaaaagcacgcccgcctcggttagcgtcaggcggcgggtggagcgcagcagcagcgtaacgcccagctcatcttcaagctggcggatattgaagctaaccaccgcttttgtcagccccatcgcctcggcggcggccgtaaaactgccggtgtcggccaccgcgataaacatctgcgtccgctgtaggttaatcatcatcacgccctttactgtcaaaatatttttgacagtatatcgcgctttgtcaggtttatccgtgcttcccgagccgatacgatacgccacctcaccggaggatccaccatgacgtatcgcagccaagttgccgttgtctatctgctgggcttttttcttgatttgatcaacatgtttattgccagcgtcgcctttccggcgatggctcacgcctttaacaccacgccttctgcccttgcctgggtcagtaacggctacattgccggcctgacgctggcgatcccgttcagcagcctgctctcgcgccgcatcggaccaaagcgcgtcatcctgctttcgctttttctgttcagcgcagcctccgcagcggcgggcctgtctgcaacgcttgaaagtctgatcgcctggcgagtgcttcagggcgtgggaggaggcttactgatccccgttggacaggcgctgacctggcaacagtataagcctcacgagcgtgccagactctcctctgcggtgatgctggtcgcgctgcttgccccggcctgctccccggctatcgggggactgctggtacagacgctaagctggcgatggatatttttcgccacgctaccggtcgctatcgtgacctttgttctggcctgcctgtggcttaaacacgaaatgcctgcgatgaacgcggccagactgctaaacctgtcattgctcgcggacccgcttttgcgtttttccatgcttgtctatatctgcgtacccggcgtatttattggggtgaacgtcacgggcatgttttatcttcagaacgtggcgaacatgagtccagccgctacgggcatgctcatgctgccgtggtctgtggcatcgtttatcgccatcacggcaacgggacgttattttaaccgtatcggcccccgacccctgatcgtcatcggctgcctgttgcaggcgacggggatcctgcttttgattgacgtcagttcggctacgctgttgcctgccgtcgcgtttgccctgatgggcgccgggggaagcctgtgcagcagcacggctcagagcagcgcgtttctgacaacgcgccgggacgagatgccggatgccagcgcgctgtggaatctcaatcgtcaattgagcttttttgccggtgccctgctgctggcgcaggtgctgaacctggcgcaggcgtggctgacgccacacgccgcctggcacgggatgtttatttttgccgcaggcatgaccttgctgcctgtaccgtacgtttttcgtcttaacaatacgcaggtgctaaacccgctgcgacaggagaattcatgacgcctttcgaacacgacattatcgacctccacattgcgcttgaagcatggttaggcaaaggtgaaggcgaggccgacgccctgctcgcccgtttccgtcgcgattttctgatgatcccgccgggcggtgtgcaggtcgactataacggcctggccagttttctggaaaaacagcgcggaagccgtcccgggctgaaaatcgtcattgacgaattaaccacgatccagagcggcgaacggggtgcagtgcttcactaccgggagacgcaaaccaggccagacctgcccgttaacgtgcgctggtcaaccgcggtgcttaatcaggaaggtgacaaaataacctggcgtctgctgcacgagacggcgacgcagccgtaacacaaaagaaaaaggcccgtctcacgacgggccttttttgacgaaaggttgcttattcgcggaacagcgcttcgatattcagaccttgcccctgcaggatttcacgcaggcgacgcagaccttcaacctgaatctgacgaacacgttcacgggtcaggccaatttcgcggccgacgtcttccagtgtcgcagcttcataccccagtaaaccgaagcgacgcgccagcacttcacgctgtttggcgttcaattcgaacagccatttgacgatgctctgtttcatgtcatcgtcctgcgtggtgtcttccggaccgttatctttttcatcggccaggatgtccagcagcgctttttcggagtcgccacccagcggggtgtcaacggaggtaatgcgctcgttgagacgcagcatacggcttacgtcatcaaccggtttatcgagttgttcggcaatttcttctgcgcttggctcgtggtccagcttatgggacaactcgcgcgcggtacgcagatacacgttcaactctttgacgatgtgaatcggcaggcgaatcgtacgggtctggttcataatagcccgttcgatggtctgacgaatccaccaggtcgcgtaggttgagaaacggaacccgcgttccgggtcaaacttctcaactgcgcggatgagacctaagttgccctcttcaatcagatccagcagagccagaccacgattgccgtaacggcgggcaattttcacgaccagtcgcaggttactttcaatcatgcgacgacgcgaggcgacatcaccacgcaaagcacgacgtgcgaaatagacttcttcttcggccgttagcagtggggagtaaccaatctccccaaggtaaagctgagtcgcgtccagtacacgctgtgtggcaccctgcgataacagctcttcttcagccaaatcgttatcactgggttcctcttctactaaggctttttcgtcaaaagcctctactccgttctcatcaaattccgcgtcttcatttaaatcatgaactttcagcgtattctgactcataaggtggctcctacccgtgatccctgaacgagacaccctggctggcatgccccgtcaaattatcgctgcggcaagtactgcagcgggtttacggatttccccttgtaacgaatttcaaaatgcaagcgtgtagaactggttccggtgctacccatggtagcgattttttgccccgccttaacttcttgttgttcccggaccagcattgtgtcgttatgggcgtaggcactcaggtaatcatcgttgtgtttgatgatgataagattaccgtaaccgcgcagagcgttaccggcatacacaacgcgtccatctgcggtcgcgatgatagcctgtcctttactccctgcgatatcgatccctttatttcccccttcggaggaagagaagttctcgataaccttgccgtcagtcggccagcgccatgcagaaatcggcgaactggaggtcatactgctggcagtcggttcagtagagctaaccacaggtgccgtaaccggtgctgtgacagcagtcgcagtccctttattattcggcaacattttgttagcagtctgatcacctgaatcctcagaatacgtaattacaggttgtgaagcaaccaccgtggtggatttttgtgcaggcttaacgctgttattttgagccgtcacatcggccgctgaaaccgtgttgccaggcgtaagcggcgtacccgtcgcgttgccaacctggagcgtttgcccgacttccagagcatatggggcctggacgttgttgcgctgcgcgaggtcacggaaatcgttcccggtgatccacgcaatgtagaacagcgtatcgccgcgtttcacggtataggtgctgccaccggtgtagctacctttcggaatgttcccatactggcggttatagactatgcggccattttgggtctgaacaggctgttcaactggctgaacctgcattggctgtgtaacaggatgttgcacaggctgaatttgtggtgtttgctgcggcgcagccgtccccattttaggtggcggcgtgattaacattccgctggacgtgttaccggagccgctgtttccgccgacggaactgacgggcgcaggcgcgttgttagaacttgtacagcctgccagccagagcgaaaccagtgataatgccgcaacacggctgatggtgaatttagggcttcccgcgctcatttatcccccaggaatgtgttaactaccagtgacttaaaatttaccgtgatggcacgaatctttcgcgccacaccatacgctgaatttgccttaataaccctggataattccgagtctcaggccaactcccccttcaccagaggcacaaagcgcacggcttccacggtgtcgataataaactcgccgccgcgccgacgaacgcgcttcaacagctgctgctcgtccccgacaggcagaaccagaatgcccccctcatccagctgcgacagcagggcagcgggaatttctggcggggccgccgtcacgatgatcgcgtcaaacggggcacgagccttccaaccctgccatccatcaccgtgtcgtgtcgaaacattatgtaaatcaagttgtttcaggcgacgacgcgcctgccactgtaaacctttgatccgctcaacggagcatacgtgatgaacgagatgcgccaggatcgcggtctgataccccgacccggtgccaatctcaagcacgcgggaatcgggcgtcagctccagcagctccgtcatgcgagccaccatgtaaggctgcgaaatcgtctggccctgcccgatgggcagcgccacgttttcccacgctttgtgttcaaacgcctcgtctacaaatttctcacgcggaaccagggcgagcgcttcaagcacgtgctcgtcgcggatcccctgcgcgcgtagttgttccagaagagtttgtacacgtttgtttaccattgcgcgttcactcctgcgcgatccagccagcccgacaccacatcatgcgcgctatacgcggttaaatctacgtgcagcggggtaaccgaaacatagccttcctccacggcggcaaagtcggtatccggacccgcatcgcacttatcgccaggagggccgatccagtaaagcgtgttgccgcgcggatcctgctgcgggatcacctgatcggcaggatgtcgactcccgcaacgggtgacgcggatgcctttaatttcatcgagaggaagatccggcacgttgatgttgaggatgcgtccggtacgcaacggctcgcggccgagcgcccgcaggatcgaacaggtcaccgcggcggcggtgtcgtagtgcgtgtagccgttcaacgagaccgccagcgccgggaaccccagatggcggccttccattgcggccgccacggtgccggagtaaatcacgtcatcgccgaggttaggcccggcgttaatgccggagacgacgatatccggacgcggccgcatcagcgcgttcacgcccagaaaaacacagtcggttggcgtgcccatctgtacggcaatatcgccattttcaaaggtaaaggtgcgaagcgacgactccagcgtcagcgagttagacgctccactgcggttacgatcgggtgccacgacctgcacatccgcaaattcgcggaggtgtttcgccagggtctgaatgcctggcgcgtggatcccgtcatcgttactcagcaatattcgcataatcacccgaggtgttgataagttccctgacaacactggtggcaaagctgcctgccggcagccagaagcgtaactcgacggtcacgtcatcccaccagttccagcttaactgctgcggatagagcagcatcgcgcggcgtgccgcgtcgactttttcccgcaccagcaaggactgcaattctggcgcatccgccacggctgactgctcggcggccagcgcgtcgccctgtgttccccagtcgcccgtaccgggcaacgcggcggtgatcagcagcccttttgcgtccacgcgcgactggacatcggccatctcttcggccgttgccacaaaccagcttccgcgtcccgctaattgtagcgcatcgccaacaacaacttgattcgcgtctggttttttcagcctttcgctcacaatctgattaaacaacgcactgcgggccgccgacaaccaaaaactgcgtttattcctgtcacgcaccggcgcgtcgctttgcgcccagcgcagtgcgccctgcaggttgctgccgccgatgccaaagcgctgcgcgccaaagtagttcggtacgccgcggtcgctgatggcattcaggcgtttttcaacgtcttcacggtcagtcacttcgcgcagcaccagcgtaaacgcgttgccttttaacgcgcccagacgcagtttgcgcttgtggcgggcatattccagtaccttacagccctcaagctcaaatttgcttaaatcaggcatcgcattgccgggaacgcgcgcgcagagccactgttccgtgacggcgtgtttatctttctgcccggcaaagctcacctcgcgggcatgaattttgaggaattttgccagcgcgtcggccacaaagcgggtattgcagccatttttcagaatacgcaccaggatatgttcgccttcgccatccggctcaaagcccagatcctcgaccacgaggaaatcttcagggctggctttcagcaccccgtccccctgcggcttaccgtgcaggtatgtcaggttgtcaaagtctgtcatttgctcgccttcaccagcagcgccacggcttcacaggcaatgccttcgccgcgaccggtaaagcccagcttctcggtcgtcgtcgctttgacgttcacgtcgtccatatggcagcccagatcttctgcaataaacacgcgcatctgcggaatgtgcggcagcatttttggggcctgggcgataatcgttacgtcgacgttgccaagggtgtagcctttcgcctggatgcggcgccacgcttcgcgcagcagttcacggctgtccacccctttaaacgccgggtcggtgtccgggaacagcttgccgatatcacccagtgcggccgcgcccagcagcgcgtcggtcaacgcatgcagcgccacgtcgccatcagaatgcgccagcagccctttttcataaggaatgcgcacgccgccaatgataattgggccttctccgccaaaggcgtgtacatcaaaaccgtgtccaattcgcattatgccttctcctgatgggtcgaacgggtaagataaaattccgcgagctgtaaatcttccggacgcgtcactttaatattatcagcacgtccttcaacaagctcagggtggaaaccgcagtactccagcgcagaggcttcgtccgtgatggtcgcaccttcgttaagcgcgcgcgttaagcagtcgtggagtaattcgcgggggaaaaattgcggcgtcagcgcgtgccagagatcgacgcgatcgacggtgtgggcgatagcccgtttgcccggctcggcacgcttcatggtgtcgcgcacgggggcggccagaatgccacccactttgctggtttcgctcaatgccagcaggcgagcgagatcgtcctgatgcaggcacggacgcgccgcgtcatggaccagcacccacggcgcgttaccggccgcctgaatgcctgccagcacggaatcggcgcgctcggcaccgccatcgacaacggtaatctgtggatgatttgccagcgggagctgcgcgaagcgctcatcgccggggctgatagcgatgatcgcccgcgtcacccgcgggtgcgccagcagcgccgccacggcgtgctcgaggatcgttttatcgccaatagagaggtattgcttgggacattctgtctgcatgcgccggccaaaacctgcggccggcaccacggcgcatacgtccgaaaaagttactgccatgtcgtaatcctgggcctgattatcgattgttttgtgctgagccctgattgcgtttagacgcatccggaaccagacgataaaaggtttcgcccggcttagtcatactgagttcattgcgtgcgcgttcctcaatcgcctcttgcccgccattgaggtcatcaatttcagcgaagagttgatcgtttcgcgccttaagtttggcgtttgttgcctgctgagctgcgacgtcatcgctcacccggctatagtcgtgcagtccgttcttaccgaaccacagcgaatattgcagccagattagcaaagccagcaacagcagcgttagtttacccatcctgccccctgaaaaacggcatcatcatcccaagacttccccagagcactacgccggggtaacagagatgccgcaacatcgcgggcaaatgtaccacattttttccgcagaatcgtcctgctcaatatcgttacacagttggttacggtttgaattatggctgaagttagcccatgagccacaaaaataacagaccaaacatcagcaccaccgtcacaatcgtgaccacggtactgtacaggagcttgccgttgagcagcgagtgaagcgcaatgccgacgacaaccgccacgggcatcagcgccagaaagaaaggccaggtgtagagaaagaaaaacagcgtgttgccgccgtagataagaaacgggatacccagcgccagcaaccatgagacgaagccaatgatggccccaggaaatgaccaggtcgtttcgtcgtcggtcgcaagcggctccgacccggtggtggtgatgtaatgttcactgttgcgcatagctagtcctgtgaccgtgactcatcgttcgggaagacagctcccgaacgataccgtctcaggatctgataatatcgtcccgtctgagcaggtctaataattggcttactaaatttgttaccaattgttgaccctccaggtgaatttctggcgattcaggcgcttcgtataccgcgtcaatgccggtgaagttgcgcaattctccggcacgcgcttttttgtacagccctttcgggtcgcgcgcttcgcaaacctccagcggcgtatccacaaatacttcgataaagcgatcctgcccgacccgttcgcgcaccatctggcgctcggcgcggtgtggagagataaatgcggtcagcaccaccagcccggcgtcggccatcaggctggcgacctccccgacccggcggatgttctctttgcggtcgtcgtcgctgaaccctaaatcgctgcacaggccatggcgcacgttgtcgccatccagcaggtacgtgcttacgccctgctgatgtaatgcctcttccagcgcgcccgccaccgtcgatttacccgagccggacagcccggtaaaccacagcactactccacggtgaccgtggagctgttcgcgctgggcgacggtgaccggatgaggatgccagacgacgttctcatcatgggcagccattacttgcctcccagcagatcgcgcgcgccccagtgcgggaagtgcttacgcaccagcgcgttcagctccagctcaaaggcgctgaattctgaagctgcggacgcctgttcgtttggctcacggaccatccccgcgccgacggtgacgttcgtcaggcggtcaataaagataaggccgcccgtcaccggattttgctgatacggatccagcaccagcggttcgtcaaaggtcagatcgaccagaccaataccgttcagcggcagctcggtaacctcgcgctgggtgaggttgttgatgtccacctggaactgaataccgtccacgcgggcgcgggtcttcttgccggcgattttgatgtcgtagctctggcccggcgtcagcggttgctccgccatccacaccacatccacggaagccccctgcacggcggccagcgtttcctgggcatccaccagcagatcgccccggctgatatcaatctcgtctttcagcaccagcgtaaccgcttcaccggcgcctgcgtcctgcaggtcaccgtcgaaggtgacgatgcgtgcgatggtcgattccacgccggatggcagcaccttgacgcgctgaccgacctttacggcgcctgacgcaagggtgccggagaaaccgcggaaatcgaggttaggccggttcacatactgcaccgggaagcgcatcggctgggtgtcgaccacgcgctgaatttcaaccgtctccagcacctccagcagcgtcgggccgctgtaccaccgcatgttcgcgctctgggaggcgacgttatccccttccagcgccgagagcggcacaaagcggatatccaggttgcccggcagctgttcggcaaaggtcagatagctctggcggatctcctcgaacttctcttcgctgaagttcaccagatccatcttgttgaccgccaccaccaggtgtttgatccccagcagcgtggagataaagctgtggcgacgggtctgatccagcacgcctttacgggcgtcgatcagcaggatcgccaggtcacaggtcgatgcgccggtcgccatgttacgggtgtactgctcgtgccccggggtgtcggcaataataaatttgcgcttctcggtagagaaatagcggtaggccacgtcaatcgtgatgccctgctcgcgctccgcctgcaggccgtcaaccagcagcgccagatccagcttttcgccctgggtaccgtgacgcttactgtcgttatgcagggaggagagctgatcttcataaatctggcgcgtatcgtgcagcaggcggccaatcagggtacttttcccgtcatccacgctgccgcaggtcagaaaacgcagcaggcttttgtgttgttgcgcgtgcagatacgcttccacgccgccttcgttggcaatttgttgagcaatagtggtattcatggcggctccttagaaataaccctgacgtttcttcagctccatggagcctgcctggtcgcggtcaatcacgcgcccctgtcgctcgctggtggtcgacaccagcatctcttcgatgatctccggcagcgtctgggcgttggattccaccgcgccggtcagcggccagcagccgagggtgcggaaacgcaccatctgttttttgatcacttcacccggctgcaggtcgatgcgatcgtcgtcgatcatcatcagcatgccgtcacgctccagcaccggacgctcggcggccagatacagcggaacgatctcgatgttttccagatagatgtactgccagatatccagctcggtccagttggagagcgggaagacgcggatgctttcgcctttgttaatctggccgttgtagttgtgccacagctccgggcgctggtttttggggtcccagcggtggaagcgatcgcggaaggagtagatacgctctttggcgcgggacttctcttcgtcacggcgcgcgccgccgaaggcagcgtcaaaaccgtatttattcagcgcctgcttcagcccttcggtcttcatgatatcggtgtgtttggcgctgccgtgcacgaacgggttaatgcccatcgccaccccttccgggtttttatgcaccagcagctcgcagccgtaggctttcgcggtacggtcgcggaattcgtacatctcgcggaatttccagccggtgtccacgtgcagcagcgggaacggcagcgtgcccggataaaacgctttacgcgccagatgcagcatgacgctggaatctttaccgatggagtacatcatcaccgggttagaaaactcggcggccacttcgcggataatatggatactttccgcttcgagctgccgcaggtgtgtaagacgtttttggtccataaccgttccttaagccaaatttacaacagaagaaccaaagccttctgtatcggttgtgtgctgaaaccaggcgagcgtgctgtgcagctgcaccacttcccccaccacgatcagggcaggcatcggggcatctttcgccagggttgcaaggtcttgaagtgtgccgacagcaacatgctgatcgacgcgcgtgccgcgagaaatgacggcgacgggggtcgtcgcctcgcgaccgtgctgaataagctgttcgctgatgtccgccgccttcatcgtgcccatgtatatcgccagcgtctggcggctctgggcgagatgcgaccagtcgaacggcgtgctgtccgccttgtagtggccggtcacaaaggtaacgctctgggcgtaatcgcggtgggtcaacgggataccggcgtaggccgttaccgcagaagccgccgtgatgccgggcaccacctggaacggaacgcccgcttcggctgccgcctgcagctcttcgccgccgcgaccgaaaatgaacggatcgccccccttcaggcgcaccacggttttgcccgctttcgcggcgtcaattagcatctggttggtgtcgtgctgcggcaccgagtgttcgcccgcccgtttgccgacgcagatttgctccgcgtcgcgacggatcagctcgcgcacgccgtcggtgaccaggtggtcgtagaacaccacgtccgcatcctgcagcacctgcaggccgcgcagcgtcaggagcccggcatcgcccggccccgcgcccaccagaatgatctccccgcccgtactgccggggttatccagttcgtcctcgaggattttctgcgccgcagtctcattaccggcatgcatcaggctggcaaagcggccgcgaaacacgcgttcccagaagcgacggcgttccgtcacgctggtcaggcgggttttcaaatggttgcgccagtagctggctttctccgccatgcgcccgaggctggtcggcagcagcgcttcgattttttcccgcagcacgcgcgccagcaccggtgcggtaccgccggaggagatcgccaccagcagcggcgaacggtcaacgatcgacgggaaaataaacgagcataaaggctggtcgtccaccacgttcaccaggcggtaacgggcctgagcggcgtcggagatccgctggttcagttcacgatcttcggtcgccgcaattaccagcacgacgctgtcgatttgtgactcgtcgaaatccgcctcttcaacgacctgcacctgggcccctgcgcgctgcagaaacgcgattttgcgatcggcgatttcacccgtgccaaccaccagcaccggtttctctttaatcgcagcaaataagggcagatagtccacaggcaacaactcactaacaacgaggaatagagggactatagggggcggcttagaccgaatgaaattacgaattggaatgagtagttactcaatggaataacgctgtgaaaaagctaataccaaaaagtgcttaacgcgcgaaatttcgggcatttaagaacgattcaaattgtgtatggacgatcacagtttcatactaggcgggttattattttgctctgtttttaaggactcactatgttttccgcaacgcgccaccgtattgctgccctggcgctcggcgtttgctttattcttcctgcccaggcaaaaaaccaaccttatggtgaaatcgccactatgcaggcgcggcatattgccaccgttttccctggccgcatgaccggctcgcctgcggaaatgctctccgcggactatcttcgtcagcagtttgccgacatgggttaccagagcgatatccgatcgtttcatagccgctacgtctatacctcgcgaaataaaacgaaaaactggcataacgtgaccggcagtacggtgattgcggcccacgaaggcagcgcaaaagagcaaattatcattatggcgcaccttgatacctacgccccgatgagtgacgccgatacggataacaatcttggcgggctgacgctgcagggcatggacgacaatgccgcaggcctcggcgtgatgcttgaactggccgagcggatgaaagatattcccacccaatatggcattcgttttgttgccaccagcggtgaggaagagggcaaactcggcgctgagaatctccttaagcgtatgagcgctgaggagaagaaaaatacgctgctggtgatcaacctcgacaacctgatcgtcggcgacaagctctatttcaacagcgggcagagtacgccgggtaccgtgcggaaactgacgcgcgaccgggcgctggcgatagcccgcagccatggggtttatgccaccagcaaccccggcggtaacccagattatccgcgaggcacaggctgctgcaacgacggggaagtgttcgataaggcgggcattccggtgctgtacgtggaagcgacgaactgggcgctgggcaaaaaagatggctaccagcagcgggctaaatcgaaggccttcccggacgggacaagctggcacaacgtgatgctggacaatcagcagcacatcgatcgcgcgctgccgcagcggattgaacaccgcagtcgtgatgtggtgaaggtgatgctgccgctggtgaaggagctggcgaaagcggggaaagcctgaggccgttaagcccggtggcggctacgccttaccgggcctacatatggaacgagccttagtaggcccggtaagcgcagcgccaccgggcaaaaaggttatcacccttcgtgcaacccgcactcgcgcttcagcccgaagaatcgcgtctcttcttccgccatgcccggttcccacttacgcgtggtgtgggtatcgcccaccgacagatagccctggtcccacagcggatggtatttcagcccgtgcttttgcaggtactggtacaccgtccggttatcccagtcgataatcggcagcactttaaacaccccgcgctgcaccgccagcaccggtaaggttgcccggctgccggactgctcacggcgcaggcccgcgaaccacgtctgggcattaagctctttcagcgcccggttcatcggctcgactttattgatctcattgtatttctcaatgccctcaacgccctgctcccacagcttgccgtagcgcgcctcctgccaggccgcgctttccgtcgcacggtaaactttcaggttcagcctgagcttgtccgtcagctcgtcaatgaactggtaggtttccgggaacagatagccggtatcggtgaggatcaccggaatgtccggacggatctgattcaccagatgcaaactgaccgccgcctgaataccaaagcttgacgagagcacatagtctcccggcaggttttccagcgcccacgccacgcgcccttcagcgtccagcttttcaaggtgggcattggtttctgccagcgccagaatgcgttcgacttttggcaggtcattaagggcgtttagatcgagtacggacatatttacctctcgtgtttactcccagaaatccctggcgggatcgagcaccgggcgaatgatgcccgcacgcaccgtaaagtcgccgaagccttcacccgcttcgcgctctttcgcccagcgcccgacaagctcgtcgatggaatcaagaatttccggctcggtgatgttctcgcggaacatacgcggaatgcgcgtgccgatacggttaccgcccaggtgcaggttgtagcgccccggcgctttccccaccagccccagttcggccagcatcgcgcgaccgcagccgttcgggcagcccgtcacgcgcataacaatatgctcgtccggaatgccgtgtttttccagaatcgcttctaccttgtcagtgaatgacggcaggaaacgttccgcttccgccatcgccagcggacaggtcgggaacgacacgcaggccattgagttttcacgctgcggcttcaccgcatccatcaacccatgttcgcgcgccagcttctcgatcttcgccttctggctttccggcacgccggcaatgatcaggttctggttagcggtgatgcggaactcgcccttatggatcttcgcaatttccagcaggccggttttcagcggacgccccggataatccagaatacggccgttttcgataaacagcgtcaggtgccatttattgtcgatacccttcacccagccaatgcgatcgccgcgaccggtgaattcgtaagggcggatcggctcaaacttgatgcccgcgcgacgctccacttccgctttgaacgtctccacgcccacgcgctccagggtatatttggttttcgcgtttttacggtcggtacggttaccccagtcgcgctgggtcgtcaccaccgcttccgccacggccagcgtatgctccagcggcaggaagccgaactcgctggcggtacgggcgtaggttttcttgttaccgtgctcaatggacaggccgccgcccaccagcaggttaaagcccaccagcttgccgttttcggcaatcgccacgaagttcatgtcattggcgtgcaggtcgatatcgttctgcggcgggatcactaccgtggttttaaacttacgcggcaggtaggtctggccgaggatcggctcttcatcggtggtcgcgactttttcctgatcgagccagatctccgcataggcgcgcgtgcgcggcaggaggtgctcggagatcttcttcgcccactcgtacgcttcggcatgcagctcggactcatacggattcgaggtgcagagcacgttacggttcatgtcgttggcggtcgccagcgcgtccagcccaacggagtgcagcatctggtgcaccggcttgacgttcttcttcagaatgccgtggaactggaaggtctgacggttggtcagacggatgctgccgtagatcgtgttttcaccggcaaacttgtcgatcgcctgccactgtttggtggtaatcaccccgcccggcagacggcagcgcagcagcatcgcgtgacgcggctccagcttctgctctgcacgctcggcgcggatgtcgcggtcgtcctgctggtacatgccgtggaaacggatcagcaggaagttgtcgcctttgaaaccgccggtgagaccgtcattcagatcttcagcaatggtgccacgcagatagttgctttccagcttcatgcgctcggcgtctgtcagtttaccttcgaccaccagtggccctggatgtttttcgctcattagtagacatctcgctgataacggcgctcaacgcgcagctcacttaaaaattcgtccgccgcttcggcatccataccgccgaattcggcaatcacttccagcaaagtctgctcaacgtctttcgccatgcgattggcgtcgccgcagacataaatgtgggcaccgtcattgatccagcgccacagctctgcgccctgttcgcgcagtttgtcttgtacgtatactttttctttctggtcgcgggaccaggccagatcgatgcgggtcagtacgccttctttcacatagcgctgccactccacctggtagaggaaatcttcggtaaagtgcggattgccgaagaacaaccagtttttacccggcgcgccgtctgccgcgcgctgctgcatgaaggcgcggaacggcgcaatgccggtgcccgggccaatcataatgaccggcgtttccgggtttgccggcaggcggaagttatcgttgtgctcgataaagacgcgcacttcgccctcttcttccacgcgatccgccaggaagcctgatgccccacccgtgcgggcgcggccttcgatgtcgtagcgcaccacgccgacggtgatatgcacttcgctctccacctcggcctgagacgaggcaatggagtacaggcgtggggtcagcggacgcagcaggccgatcagcgcatcggcatccagctgagccggagagaagcgcaccatatcgacaatcggcgtcgtcgcggcgtaatgctgcagcttcgccttgtcgcccaccagcggcagcagggattcgctgcgcgttaaggtggcataattttcgacgatattcggggtattcaccgtcagctcaaaatgccactgcaacgcttcagaaagcggctgcgttttgccgtcaacggtgacgggctcgtcgcctttcagccacagcagctcaaccagctctttcaccagcgccggatcgttctgataccagacgcccaacgcatcgccaggctgatagcgcaggcccgagtcgccgagatcgatttcgatatggcgaacgtctttttcggaatcgcggccggtaattttctggttcaccgacaggctcgccgccagcggcgcctctttggtgtacgggctggtgtggatgtcgttaacagcacccgtcgcggtgaacgcggcctgggctgacgtctctttcggcacgcgcgcttttagcacgtcaacgatgcgggcacgccattcagcggcggcggtctggtattcgacatctgcgtcaacgcggtccagcaggcgctctgcgcccagctccgccagcctgctgtcgaagtctttgccggactggcagaagaattcataggaggtatcgcccaggccaaagacggcaaacgccgtgccatccagcttcggcgcctttttcgagaacaggaacttatgcagcgccaccgcttcttctgcgggttcaccttcaccctgcgtagaagccaccaccaccagcagtttttctgacgcgatttgcttaaatttataatccccggcgttgaccaggttcacgttcagcctggcggccagcaggtcgtcacgcagcgcttcggccacgcggcgggcgttacccgtctgcgaggcggaaatcagggtaatggccggaatttctacggccgtggccggtgcacccgccacagcgccaggctgctgattaagcattccccagaaataaccggagacccaggcaagctgagtgggagaaaaatcagaggtggcagcctgaaggcgcgccagctgctccgggttcaggggaagcaagtttgaaggtggggcctgtgttgtcatgcgtcgttatgttccagtagccaagcggactttaagcgaataaatccaaactgaagataaggttaacggcgaggataataacaattaaagaagggatggaaataataaataaccaaatggactaacctgttttggttgtcatgcttagcgataaaaccgattaaataattatttgaaatataagaagaaatagcgataaacaccccatatacgaggcggttgccgctcagagccgttttagttaatgctaaaaattgtgctttccggtactatgcggcggttttttccgcattactgagagcgatcatgtccaccacactgtttaaagatttcaccttcgaagccgcccaccaccttccgcatgtccctgaagggcataaatgtggccgtctgcacgggcattcgttcatggtgcgtcttgagatcaccggtgaagttgatccgcataccggttggatcatggattttgccgagctgaaggcggcgtttaagccgacctacgatcgtctggatcacgactacctgaatgagatcccgggccttgaaaacccgaccagcgaggtgctggcaaaatggatttgggatcagatgaaaccgcgggtaccgctgctgagcgcggtgatgatcaaagagacctgtacggcaggctgcgtgtatcgcggcgagtgatgcttgccgggtggcggcttcgccttacccggcctacaatcgcctggaaccgtaggcccggtaagcgctcgcgccaccgggctttttttcaggcgatattcagatacttgtgcgtctgcatcgacaggcgccagttgcgcgcaatacaggtttcaatgcacaggcgcgttgcatcgtctttctggctgataggctgcagggctatgacccgctgcttttcgtccgtcagcgtggccagcagttcatccagcgcttcgatatcacgcacgcgtcctaccgggtgcttaatctcatccgcgcgctccagcgcctgagacagcacgtcatacccgccgcgcatattcacttttggcgataccgtcacccaggtggtgtgcgagcagcgcacttcatgggtgccgctggtctcgatctggcagctgtagccgttcttttcgagcagctcggtcagcggcgtcagatcgtggatgcagggttcaccgccggtgatcacgacgtgacgcgccgtccagccctgacggccaataatggcgagcagatcctcggcactgcctgccccccacttatcgctctctttggttttcgccagaatgctaaatagcgacacttcccgatctgcgagcttatcccacgtatgtttggtatcacaccaggcacagccaaccgggcatccctgtaaacgaatgaaaatagcgggaacgccggtaaagtaaccctcgccttgcagggtctggaacatctcgttaatcgggtactgcatagtcatctcagtaaaggggataaacgataagtatcgcagatccccgccggatggtcatgctccatcggtgctttacgcgccaatcgccgccataaaccgttccgtgatttgctgcggacgggtgatcgcgccgccgaccaccaccgtatgcgcgcccagcgccagacacctggccgcacgctcgggggtatccacgttgccttcggcaaccacgggcaccgtcacggcggccagcaccgccttcaggaacgcgcagtcgttttccggaagtgaatggcccgccgtttccgccgtgtagccgtaaagcgtggtgccgacgcagtcaaagcccagcgcctgcgccgtcacggcttcctccacggaggagatatccgccatcagcagcaccgcgggataacgtgcgcggatgcgcgagaccagcgttttcagagattctccgccgggacgtggccgcgccgtcgcatcaagcgcaatgatgtccggcgagacgctcatgagctcatccacctctttcattgtcgcggtgataaacacctcgctttcgggataatcccgtttgatgatgccgatgaccggcaaagacacctgctgcctgatggcctcgatatccaccacgctgttcgcgcgaatggcggcagccccgccctgtgccgcagccagcgccatgcgcgacataataaacgggctgtgcagcggttcattttccagcgcctgacaggagacgactagttttcccttcagggtatccagtacagttttcattacgataagatctcttccacttcgtttttgataatcgtgacgtgcgggccataaatgacctgaacgccgttgccgcgcacgataacgccgcgcgccccggtggctttcagtgccgactcattcactttgctgccgtctttaaccgtgacgcgaagacgcgtggcgcagcagtccacctcgtccagattctcttttccgcctaatccggcgatcaccgcggctgcgcgttcgttttgcggcagactgacctcatcagccatcgcctccttttcccgacctggcgtcgcgaaatcaaagcggttaatcagatagcggaaggtaaagtagtaaaggaagaaccacggtacgccgaccagcggaacgaacatccagttggttttggcttctccctgcaaaatgccgaacagtacgaagtcgatgaaaccgccggagaaggtttgcccgatggtgatatgcagcatgtgcgcgagcatgaatgccagcccgtcaaacagcgcatggatgacgtagagcaccggcgcaataaacaggaacgagaattcgataggctcggtaatcccggtcaggaacgaggttaacgccgcagaaagcagcagcccggcaacgcgttttttgttctcgggttttgccgtgtggtacatcgccaggcacgccccgagcaggccaaacatcatcgtaataaagcgcccggacatgaagcgtgacgtgccctcatagaaatgttgcgtgttcgggtcagccagctgagcgaagaagatccgctgcgtgccttccacgaggtgtccgttgacgatttcactcccgccaagcgcggtggtccagaaaggcagatagaagatgtggtgcagaccgaacggacccagcatgcgtaaaatgaagccgtacagcaaagtgcccagatagccggtcgcatccaccagcccgccgagaccaaaaatcagcttctggaaatgcggccagaccacggtcatgagcgcaccgacgagtatcgccgccagcgagctgatgataggaacaaagcgcgagccgccaaaaaagcccaggaactgcggaagtgcaatcttgttaaaccgatgatggagcgcgcaggttaccagcccaatcaccacgccgccaaagacgccggtttccagcgtctgaatacccagcgtcatgccctgccccaccgcacccgggttctcatgcgccagtttgccggtgaggatcagcagcgcgttgatggtggcattcatcaccagaaacgcgagaagcgccgccagccccgccgtgcccttatcgctttttgccagcccgacggcgaccccaaccgcaaacagcaccgagaggttcgcaaacacgatggatcctgcgctgctcatgatggtgaaaatggcctgcagccagctcacgtctaaaaacggataggccgccagcgtgttgggattggatagcgcgccgcctatccccagcagcagacccgccgcaggcagcacggcaatcggcaacataaaggatttgccaaagcgctgcgctttttcaaaccatccccctgaagaagccccactgaatatttgcatcattttttcatccccccactaatagatgaaaatttttaccatattaattttaaatagtgaaaattatcatcaaaaaccaggacgacgatcatactttttcgaaatgactggcatcccgcccccgctttccgccacactagtcgcagagaaacgcattaaggatcgagcatgtcagaccatgaaaacctgctgctgaagctacgccaggaggcttccgggtacagcccaacacaacaaaaactcggtgagtttgttctcagcgatcctgcccgggtgctctacctgacgatcaccgaactggcgcgcgagagccacaccagcgaggccagcgtgacgcgtctttgccgcacgctgggctgcaagggctataacgaatttaaaatggcgcttgcgctggatattcagcagggccagcccgcgcgtcaggcgggggatgagattgataacgtcgtggatgagtcggtgcaggctttgcaggacaccgcccggctccttgaccgcacgctgcttgaaaaggccgcgctggcgctgcatcaggcgcagtcggtgcagatttatggcgttgcggccagcgcgatcctcggggagtatctgcactacaagctgttgcgtctgggcaaacccgcacagctgtttagcgatatgcaccgcgcggccatgaatgcgacaacgctttcgtcagaaaccctggtggtggctatctccagttccggctcaacgcgggatctactccatgtggtgaaacttgcccgcaagcgcggcgttaaggttctggcactcagcaatacgccccgcagcccgctggcatcgatgagcgatatgcagctggtggccgccaagccagaggggccgcttagcgcgggcgcgctcaatgccaaagttggggtcatgctgctggtcgaactgctgaccacgtccatgattgcgctggatggccgttacggcgacgttagccagcaaacggccagcgccacgcttcctctgttactctaaaaacccttcgcaggctaaataaaatagcctgcgcttaatgtcgcctgatttaagttaagtggtgtttaaatcatttatccggtaaatgtttggtgtaacaaagtattatatttattacatttcgaattaagttcaccacccgataagaacccaaaaaaggactttaaaatcataatgttgaaatattcattttaataaattgaattttcaccctgcctgtaatgtccaatatctccacctgaattcctttccttaaaataagcttaagatgctgtcgatttcggcgttttattatttaaatgccgtttacttttgcacgcctacaatccgcctcatcaatcataatgagacggtattaatgaagatgttaatgattacaggcgtgacggggtttctgggcggtgcagtactggaaaaaattctgaccagcgatcaatccgtaaaactgcttttgctcgcgcgtgccagcgatccgcagagcgggctggagcgcgtgctggagaacatgcgcaagttcaacgttcctgaggacaaactggccactctgagcgtggacaatatcctcattggcgatctcagccagcctgaagccttcctgaacgatccgcgtctggaccaggtcacgcatgtcgtgaactgtgcagctgttgcctcatttggtaacaacccgctcatctggaaggtcaacgtggaaggaacgctggcactggcgcgccgcatggagcaggtttcaacgctacaacgcttcctccacgtgggcacggcaatgtcatgtacgccggagcaggattccctggtcgccgaaagcgccgaattcagagagaatgctgaacacctggtggaatacacgttttcgaagtcaaccatcgaacagctgatgcgccaggaatgtccgaacctgccgctgctcatcgcgcgtccgtccatcgttgtcggccatacccgccacggctgcacgccctcgagcagtattttctgggtcttcagcatgggcctgatgctgcagaagtttatgtgctcgatggaggaccggatcgacgttgtcccggtggattattgcgccgacgcgctgttaatgctgctcaacagcaacgcgcgtccgggggaagtggtacacatttcggccggagaagagaacagcgttcgctttgcggatattgataatgcgatggcgcaggcgctggagaaagcacccgtcggcgataagtacgcgcaggtcagctacgaaacgctggtcagaatgcgccgtgaactgaaaacgatttttggcccgtgcaacgaacgtctgatgctgagagccatgcggttatacggcgcgtttgccacgcttaacgtgcgattcagcaacgataagctgctgagcatggggatgccgaagccaccccggtttacggattacattgcccgctgcgtgcaaaccacccgggggctgaccattccggagcaaatggcggtcgattttaaatagccaaaaaaaatgccagtcattcgactggcattttcatgttaaggcttaggcgattatgcctggcctttgatctctttacgaccgttgtatggtgctttttcgcccagcgcttcttcgatacgaatcagctggttgtatttagcaacacggtcagaacggctcatagaacccgttttgatctggccagcagcggtacccacagccaggtcggcaatggtcgcgtcttcagtttcgccagaacggtgagagataaccgcggtgtagccagcgtctttcgccattttgatcgcagccagcgtttcggtcagagaaccgatctggttgaatttgatcaggatggagttaacgatgcctttctcgatgccttctttcaggatcttggtgttggttacgaacagatcgtcaccaaccagctggattttgtcgcccagtactttggtctggtatgcgaaaccatcccagtcagactcgtccagaccgtcttcgatagacacgattgggtactgtttggtcaggtcttccaggaagtgagtgaactcttcggaggtgaacgctttgttgccttcgccagccagaacgtatttaccgtctttgtagaattcagatgccgcgcagtccatcgccagggtgatgtctttgcccagctcgtagcctgctgctttaaccgcttcagcgataacagccagtgcttctgcgttagaacccaggtttggcgcgtagccaccttcgtcacccacagccgtgttcatacctttagctttcagaactttagccaggttgtggaacacttcagaacccatacgaaccgcttctttcagggttttcgcgccaactggctgaatcatgaattcctgaatatcaacgttgttgtctgcgtgctcaccaccgttgatgatgttcatcattggtacaggcatggagtatttgccaggggtgccgttcagttcagcgatgtgctcgaacagaggcatacctttagcagccgcagctgctttggcgttcgccagggaaaccgccaggattgcgttcgcaccgaagttagatttgttttcagtaccgtccagatcgatcatgatcttgtcgatgccagcctgatctttggcatctttgccaacgatagcctgagcaataggaccgtttacagcgccaaccgctttcagtacgcctttgcccatgaaacgggatttgtcgccatcacgcagttccagcgcttcgcgggaacctgtagaagcacctgatggagcagctgccataccgacgaaaccaccttccagatgaacttcggcttcaacggtcgggttaccacgggagtcgatgatttcacgaccgatgactttaacgattttggacattagattttcctcagtacaagttaaactaaaactccagacaaacaacgcgtaccaggggtacgcgttgccgttctaactttttttacttcgcctgacgcttctggtagtcgctggcggccttcacaaagcctgcaaacagcggatgcccgtcacgtggcgttgaagtaaattccgggtggaactggcaggcgacaaaccacggatggtttggcacttcgatgatctcgactaactgatcatccccggagcggcccgcaacacgcagacccgcagcttcaatttgtttcaacagcatgttgttgacttcatagcggtgacgatggcgctcggtgatgaccggctcgccgtacagcttgcgaaccacgctatcgtcagtcagctggcaggcctgtgcgccgagacgcatagtgccacccagatcgctcttctcggtacggacttcgacgttaccgtcttcatcacgccattcagtgataagcgccacaacagggtacttacagtctggcacaaattccgtagagttcgcgttttccattcccgctacgttgcgcgcaaattcgatcagcgcaacctgcatacccagacagatgccgaggtatggaatattgttttcacgcgcataacgcgcggtggcgatcttgccttctacaccacggtagccgaagccgccagggataaggatagcatccagatctttcaggatttcaacgccacgcgtttcaacatcctgcgaatcaatcagcttgatgttcacggagacacggttcttcagaccaccgtgtttcagcgcttcgatcacggacttataggcatccggcagctcaatgtacttgccgaccataccgatagtcacttcgcctgccgggttggcttcttcgtaaataacctgttcccattcagacaggtttgcttccggacagttcaagctgaatcgtttacaaatataatcgtccagaccctgtgatttcaacaggcccgggattttataaatggaatcgacatctttcattgaaataacggctttttcaggcacgttacagaacaatgcaattttcgcacgttcgttcgccggaatggcgcgatcggaacggcaaaccaggatgtcaggctgaataccgatagagagcagctctttaacagagtgctgggtcggtttggttttcacttcacctgccgccgccatgtaaggcaccaacgtcaggtgcatgaacagcgcgtgttcacgaccaatgtctaccgccagctgacgaatcgcttcgaggaacggcagggattcgatatcacccacggtaccgccgatttcaaccagcaccacgtcgtgcccttcgccaccggcaaggacacgctctttgatggcgttagtgatgtgtgggataacctgcacggtcgcgcccagatagtcaccacggcgctctttacgcagaacgtcagagtagatgcggccagtcgtaaagttattacgacgggtcattttggtacgaatgaaacgctcgtagtggccaagatccagatcggtttcagcgccgtcttcagtaacgaacacttccccgtgttgggttgggctcatggtgccaggatcgacgttgatatacggatccagtttcatcatggtcacattgaggccacgggcttcaagaatggctgcgagggaggctgcggcaatgcctttacccagagaggatacgaccccgccggtcacaaaaatatagttcgttgtcatgctgaacctgagaagttagggtgaaacgatggaataaccaggacgggaaagtagtatacccgaacacggcgagcgccacaaactttcattctccgtctccattccaggccatgacaaacataaggagtgagaaaatagccccttttgggtaaatgtttttgacgcaaatcaagcgcttgtcatttaaaaaatcacacaaattgcgcttgatcgcaaaatttcgttagagatcagattcctggcgctttacttcctgccagacttcctccatggcgtcgaggtcaataccgctcatttccaggcctcgcgaggcgacaatccgctccacttcgcgaaagcggcgttcgaacttaaggttggctttttgcagcgccgtttccgcttttacacccaggtggcgagaaaggttgacggtcgcaaacagcagatcgcccatctcttcctcaagctttgcttcatccaccaccgcctgctgcgcttcgtgcatcacctcgtcaatctcttcgtgcactttatccagcaccgggccgagtgaggtccagtcaaaccccacggcggagcagcgtttctggattttgtgcgcgcgcatcagcgcgggcaggctcagtggaatgtcgtccagcgcggagtgctgggatttttctgcccgctcggcgcttttaatctgctcccagcgggccaggacttcggtgctggttcctgcggtagcgtcaccgaaaatatggggatgacggcgctcaagcttgtcgctgatggcagcgcaaatatcgtcaaagttaaagcgcccctcttcctgcgccatctgcgcgtagaacacgacctggaaaagcagatcgcccagctcgccgcgcaggtcgtcaaaatcttcacgggaaatcgcgtccagcacctcgtaggtctcttcaagtgtgtacggggcgatggtggcgaaagtctgctctttgtcccacgggcagccgttttccgggtcgcgcaggcgtttcatgatgccgagcaggcggtcgatttgagtcataatactgtcctgatgaaaaaatgccgggtggcggcgttgccttacccggcctacggaagaggatgtttagccgccgtgcagacgacgcgcgtcaatcacatccggcacctggttcagcttgccgagcacgcggcccagcacctgcaggttatagatttcgatggtcatatcgatggtggcaagctgctcgcgggtatcgctgcggctggcgacgcccagcacgttgaccttctcgttggcgagaatggtggtgatgtcgcgcagcaggccgctgcggtcgttggcagtgacgcgcaccaccagcgagtagccggcggagtagctctcgccccagaccgcttccacgatgcgctccggcgcatgggactgcagctcggcaagctggtcgcagtcggaacgatgaatcgaaattccgcgcccctgagtgataaagccgacgatatcgtcgcctggaattggctgacagcagcgggcaatgtggtgcatcaggttaccgacaccttcgaccaccacgcggccgttgtctttgctgcgctgctgcggcgcgtaggttttctgctgcagttgcttcagcgccgccgcgtcctgctcttccgcgcttggcttattgaactgcgcctgcaggaagtttaccatctggttcagacgaatatcaccgccgccaatcgccgctaacagctcatcaagctcgttgaagttgtagcgcggcagcaggaatttctccgcctctttcaggctgatcccgatatgctccagctcgtcgtcaaggatctggcgaccggcaaggatattcttgtctcgatcctgtttacggaaccaggcgtgaatcttcgagcgcccgcggctggtggtgacataccccaggttcgggttaagccagtcccggctcgggttcggctgcttctgggtaatgatttcaatctggtcgcccatctgcagctgataggtgaacggtacgatacgcccgccaattttcgccccgatgcagcggtgccccacatcgctatggatgtggtaggcaaaatcgagcggcgtagagccggccggcaggtcgacaacgtcccctttcggggtaaagacgtagacgcgatcgtcaaagacctggctgcgcacttcgtcgagcatctcgccggaatcggccatctcttcctgccacgcaatcagcttacgcagccaggcaatgcggtcttcgtggcctgaacgcgccccgccggacgtgccttctttgtatttccagtgcgcggcaacgcccagttcggcgtcctcgtgcatctgtttggtgcggatctgaatctcgaccgttttaccgccagggccaagcaccacggtatggattgactgatagccgttcggtttggggttggcgacatagtcgtcgaactcatcgggcagatgacggaagtgcgtgtgcactatccccagcgcggcgtagcagtcctgcagacgctccgccacgatacgcacggcgcgcacgtcaaacagctcgtcaaaggcgaggtgtttcttctgcatcttgcgccagatgctgtagatgtgctttggtcgaccgtagacttcagcgcgcacgttctcttctttcatcgcctggcgcagtccgccgacaaactcctcgatatagtgctcgcgatcgatgcggcgctcgtgcaggagtttggcaatccgtttatattccgccgggtgcagatagcggaagcagtaatcttccagctcccatttcagctgaccaatccctaagcggttcgccagcggcgcatagatgtttgtacactctttggcggccagcacgcgctcgtcttccggcgcatccttcacctctcgcagatgggcaatacgctcggccagcttgatgaccacgcagcggaaatcatccaccatggccagcagcatccggcgaacgttatcgacctgctctgaggagacggaatccgtatgcgcggctttgagctgacgaatggctgccatatcgcgcacgccgtggatcagcgcgacgacggattttccgacgctgtcgcgcagcacgtcttcgctgaccacgtccgcatccgcgagggggaagagcagcgcggcctgcagcgtttcgatgtccatgttcagcatggacaggatttcaaccatctccacgccgcgccacaggagaagatcggcgtcgggatgcccctgcgtggtgcgcagacaataggcccaggtttcggttaagcgttcacacgactgctggctggaaattcccagacttgcgatccatttttgtgggtcaaactccccagctttattgagatgtgcacttcttaccgcaaccattgtcctctcctttagggaccagggcctgtcgaagtcgacaagccaaacaaattagatgtgctcgaacaacaccatcgattccagatgcccagtgtgcgggaacatgtccagcattgccagacgctgaatctggtaacccgcgctgagtaatgcctcgctgtcccgggcaagcgttgccgggttacaggaaacatagaccacacgctttggcgcgagtttaataatatgcgccatcacgcccggggcaccggcacgcgccgggtcgagcaaaattttatcgaagccctgctttgcccacggctgttgggtgacatcgtcctcaagattttgatgaaagaatgtcacattttgcaagccgttctgccgcgcgttctcctgccctttcgccaccagggcctcaacgccttccacaccgacgacgcaggccgcttctcgcgccagcggcagcgtgaagttgcccattccgcagaacagatcgagcacccggtcgcttttctgaacgtccagccacgccagcgctttcgctaccatctgctggttaacgccatcattcacctgaatgaaatcccgcgggctgaacgttaagcgtagcccgtttgacgcataccagggcgcctcaccggtaacctgttcaagtatctcgctttgtggtgcaaggaaaagcgccaggtcgtgggaatgcgaaaagcgttccagtttttcgcgatctttcttcgacaacggcgcggtatggcgcagcaccatcagcgggccattgtttgccatgaccagttcgacgtgcccaagatggcgtacgccgtccagcccggagaggcagatgcgcacttccggaagcaatgcctcaagatggggcaccaaaatggggcactgcttcacgtcaacgatgtcgctggagccggccttgcgaaaccccatctccagccgctccgtttttggctgatagctgaggctcaggcgcgcgcgacgacgatagccccagggctcatcggcaacaatttcgttaacgtcatgtttgagcagacgcgccagcgcacggcttttgcttttttgctgtaattctgtgttcgcatgctgttgctggcagccgccgcacacgccaaaatgggggcagcggggtgccacacgctccgggctatcgctgaggcgacgcttaacctgcccgcgcgcaaactggcgtttatcttccgtcagcgtaatttctgctcgttctgctggcagtaaacctgttataaacagagccttaccattgtggcgtgccactccctggccaaacggatcgaggtccgtggcctcaacagtgatgatttgacgcgtcgtcacgcgtcgctttgcagagtagaattgcgccatcgccgagatttttctcacataaccataattatcttaattgtcccataacggaacgccatgaccaactacagcctgcgcgcgcgcatgatgattttgatcctcgcccccaccgttctcatcggtttgctgctgagtatcttctttgtggtgcaccgctataacgatttgcagcgacagctggaagatgcaggcgccagcattatcgaaccgcttgccgtctccagcgagtacggcatgaacctgcaaaaccgcgaatccattgggcagttaatcagcgtactccatcgtcgtcactcggatatcgtacgcgccatttccgtttacgacgaacataaccgcctgtttgtgacctcaaactttcatctcgatccggcagcactgaagatcccggaaggtacgccgttcccgcgccacctcaccgtattgcggcgcggcgatatcatgatcctgcgcacgccgatcgtgtcggaaagctattcccccgatgagtctgcgcagtccgacgccaaatccagcaataatatgctgggatatgtggcgctggagctggatctcaagtcggtccggctacagcagtacaaagagattttcatttccggcgtgatgatgctgttctgcatcggcattgcgctgatcttcggctggcgcctgatgcgcgacgtgacgggtcccatccgcaacatggttaacacggttgaccgcattcgccggggacagctcgacagccgtgtggaagggtttatgctgggcgagctggacatgctgaaaaacggcatcaactcgatggcgatgtcgctggcggcctatcacgaagagatgcagcacaacgttgaccaggcgacgtccgacctgcgcgaaacgctggagcagatggagatccagaacgttgagctggatctggcgaaaaagcgcgctcaggaagcggcgcgtattaaatcggaattccttgccaatatgtcacacgagctgcgcacgccgctcaatggcgtgatcggctttacccgtctgaccctgaaaagcgagctcaaccccactcagcgggatcacctgcacaccattgaacgttcggccaacaacctgctggcgatcattaacgacgtgctggacttctccaagctggaagcgggcaagctgatcctcgagagtatccccttcccgctgcgcagcacgctggatgaagtggtgacgctgctcgcgcactcgtcgcacgacaaaggcctggagctgacgcttaacattaaaaacgacgtgccggataacgttattggcgatccgctgcgcctgcagcaggtcataaccaaccttgtcgggaatgccattaagttcaccgaaagcggtaatatcgacatcctggtagagaaacgctcgatcagcagcaataaggtccagattgaagtccagatccgcgataccggcatcggtattccggagcgcgaccagtcgcgtctgttccaggcgttccgtcaggcggacgctagcatctcccgccgtcatggcggtaccggtctggggctggtgatcacccagcgcctggtgaacgagatgggcggcgatatctctttccacagccagccaaaccgcggttcaaccttctggttccacattaatctggaccttaatccgaacgtgctgaccgatggcccggtgacggactgcctgaaaggcaagcgtctggcctacgttgagcctaacgctgcggcggcgcagtgtacgctcaacatcttaagcaccacgccgctggaggtggtctacagccccaccttctcggcgcttgccgtagagcattacgatattctgctgatgggcattccggtcaccttcaccggcgagttgaccatgcagcaggagcgcctggcgaaagccgcgtcaatgaccgactacctgctgctggcgctgccgtgccatgggcagctcaacgcggaagaactgaaaaacgacggcgcggccgcgtgtcttttgaaaccactgaccgcaacccgtttgctgccagccctcacggaatattgccgtcttagccagcatgcccttccgctgattaacgatgagcaaaaattgccgatgagcgtgatggcggtggatgataatccggccaacctgaagctcattggcgcattgcttgaggaccaggttcagcatgtggagctgtgcaccagcggcgcgcaggcggttgaacaggctaagcagatgcagttcgatttaatcctgatggatattcagatgccgggcatggacggcatccgggcctgcgagctgatccaccagttgccgcatcagcagcaaacgccggttattgctgtcaccgcgcacgcgatggcgggccagaaggagaagctgctgagcgccgggatgaatgactatctggcaaagcccatcgatgaagagaaacttcatagcctgctgttgcgctacaagccgggtcatattggcggaacgtacacggtttccagcgaaccggttgaaatcagcatcaatcaaaacgcgacctttgactggcagctcgcgctgcgccaggcggcaggtaaacccgatttggcccgcgacatgctgcaaatgctggtcgcgtttctgccagaaattcgcaacaaggtggaagagcagctggtgggtgaaaacccggaagatctgctggacgcaatccacaagctgcacggcagctgcgggtacagcggcgtaccgcgactgaaaaacctctgtcagcttctggagcagcagctgcgtgccggtacgccggaatcggagcttgaaccggagttcctggagctgctggatgaaatggataacgtgacgcgggaagcgatgaaggtgttggggagctgaggtaaaagcccggtagcgctacgcttgccgggcctacaggtgcactaacgtaggccgggtaaggcgaagccgccacccggcaatcacagttaaaatgcctgccccactttcagcaccgccgcgatattccttgcggccatcctgacgttctcgccggcattttccagcgcgtcttccagcgtgcagatggtgtagatcacgctaaacacggcatcaatgccgtgatcgtgtaccacgccaacgtccgccgtcaggctgcctgcaatgccaataacgggtttgttaaagcgttttgccaccttcgccacccccaccgggactttgccgtggatcgtctggctgtcaatgcggccttcccccgtgatcaccagatccgcatcggccacctggtcggccaggtgtagcgcatcggtcacgatctcaatgccctggcgcagctgcgcgccgcaaaaggcgtagagcgccgcgcccatgccccctgccgcgccgccgccagcaaggttcagtacgtcgatatccagatcccgggcaatgacgctcgcatagtgcgcaagcgcattgtccagggtgacgatcatctcgggagtggcccccttttgcgggccgaataccgctgacgcgccatcgttcccggtaagcggattggttacatcgcaggccacctcaatccggcattccgccagacgcttgtccagcccactcaggtcgatacgcgcgagttttcccagctcgcccccgccctgcccaagaggctgttcattgtcgtccagcagcttcgcccccagcgcctgcaccatccctgcgccgccgtcgttggtagcgctgccgccaatgccaataataatatgcttaacgcccgcatccagcgcgtgacgaatcagttcgcccgtgccccaggaggtggttttcagcggattacgctgcgaaggcgcaacccgctccaggccgcttgccgccgccatttcaataaaggcgctctgcttatcaccggacaagccataaaacccctccacgcgctcgcccagcgggccggtcaccggaacatgcacaatgcttccctgcgttgccgcgatcatcgcctcaaccgtcccttcgccaccgtccgcgaccggcagcttcacgtaaaccgcctcgggaaagatctcgcgaaaaccacgttctatcgctgtcgcaacctcaagcgcactcaaactttccttatacgagtccggtgcgataacaattttcataagccatccttacgcatagtcgttacgttaagcatacaccacgtaaaagaccgctcatgggagcggtcccaatgcgtttatcgtaccatgcacgggcgtttattgtcgaatgtccagtcagggatgagatactgcatcgccatcgcatcgtcgcgcgcgcccagaccgtgtttctgatacagctcatgggccttcatgacctgatccatatccagctcaacccccagccccggcgtggaaggcacctgcaccatgccacctttgatctcaaacggctgcttagtgagacgctgattaccttcctgccagatccagtgggtgtcgatagcagtgatcgtgcccggcgcagcggcggcgacgtgcgtgaacatcgccagcgagatatcgaagtggttgttggagtgcgaaccccaggtcaggccaaactcatggcacatctgcgccacgcgaaccgacccctgcatcgtccagaagtgcgggtcagccagcggaatatcgactgactggagggataaggtgtgtcccatctgacgccagtcggtcgcaatcatattggtcgcggtcggcagccccgtagcgcgacggaattccgccatcacctcacggccagagaagccttgctcagccccgcacgggtcctccgcgtaggccagcacgcctttcagctgcttgccgatcgcaatcgcttcatcaagggaccaggccccgttcggatcgagcgtcacgcgcgcctgcgggaaacgttttgccagcgcggtgacggcttccgcctcttcttccccggccagcacgccgcccttcagtttgaaatcgttgaagccatatttttcgtatgccgcttccgccaggcgcaccaccgcatccggggtcattgcctcgtcgtggcgaagccggtaccagtcgcattgttcatccggctggctctgatacggcagtagcgtcagcttgcggtcgccgacaaagaacagatagcccagcatttccacttcgctgcgctgctgcccctcgcccagcagcgacgcaacgttaacgcccagatgctggcccagcagatccagcatcgcggcttcaatgccggtcaccacgtggattgtggtgcgcagatcgaaggtctgcagaccccggcctccggcatcgcgatcggcaaaggtgttgcgcacggtgttgaggacatttttgtactcacccagcgttttgcccaccaccagcggaatggcgtcctccagcgtgttgcggatcttctccccgcccggaatttcgcccacgccggtatggccggcattgtctttgataatgacaatgttgcgcgtgaagaacggcgcgtgcgcgccgctcagattcatcagcatgctgtcatggcccgcaaccggaacgatctgcatggcggtgacgacaggggtcgtaaaagtactcatcgtgtaatccttttatcagtgacgtccgaaaacagggcgcttacggtcaaatgtccagccgggaataaggtactgcatcgggcccgcatcgttacgcgcgccgcccggcaattttttatacgcctcatgggctttatggatccgatcccagtccagctccacgcccaggcccaggcccggcgcatccggtacggcaatcttgccattgatgatttccagcggatttttcgtcaggcggccttcgccttcctgccaaatccagtgcgtgtcgatggcggtcgggttacccggcgcagcggcgccaacgtgggtaaacatcgccagcgaaatatcaaagtgattgttcgaatgacagccccaggtgagcccccagtcatcgcacagctgcgccacgcggaccgcgcctgagagcgtccagaagtgcgggtccgccagcggaatgtcgacggcgttgagcatcaccgcatggcccatttcgcgccagttggtggcgatcatattggtcgccaccggcagtccggtagcacgacggaactcggccatcacttcgcggcccgaaaagccctgttccgcgccgcaggggtcttccgcataggtcaggacatcgcccagccctttgcacaggctaatcgcttcatccagcagccatgcgccgttgggatcgacggtgatccgagcatccgcaaagcgttttttcagcgcccggaccgtttcaatctcctgctcgccgggcagcacgccgcccttcagcttgaaatccttaaagccgtagcgatcctgcgccgcctctgccagccgcaccaccgcgtcgctggagagcgcttcctggtggcgcaggcgataccagtcgtgttcgcccctggagcgagccagataggggagatcggttttattgcgatcgccaatgtagaacagatagcccagcacggtgaccgcatcgcgctgtttgccgggccccagcagttcgcagaccgggacattgagcgccttacccagtaaatcaagcagagccgcttctagtgcggcgaccgcattgacgcgcagttcaaacgtccaggcacctttaccgaacgtctcaaagtctgccgactggttgcccttatgcacccgctgaaccaccctgttcagacgggcaatctcctgccccacgacctgcggaatggcatcgaccagcgtctggtaaatcacctctccgccaggggcctcgcccacgccggtattccctgcgctgtcttttagcacgacgatattacgggtaaaccaggcgttatgggcgccgccaatattcagcagcatgctgtcctgcccggccaccgggatgaccttcatctcagtgacgatagggctcgattgcgttgtcatcagccacgctccgcaacaggtttaagttcgacgcgtttgatatcccccaccagcaccaggtaactcaggaccgccaccagcgcatgcacgcccacgtagattagcgcaccgttgaaagagccggtggtaccgacgatgtagccgatagcgatgggcgtcacaatcccggagatgttgccgaacatgttgaacagaccgccgctcaggccgctgatctctttcggggccgtatccgccatcaccgcccagcccagcgcgccaatgcctttgccgaagaaggccatcgccataaagccgataatcatccactcggcattgacgtagttacagaacaccatggtcatggagagcagcatgccgagcacgatgggcgttttacgcgcgatgttcagtgaacccgtgcggcgcatcagccagtcggaaatcaccccgccgagcacgccaccgacgaagccacagatggccgggaccgaggcaacaaaccccgctttcagaatcgacatgccgcgtgcctgcaccaggtacaccgggaaccaggtgatgaaaaagtaggtcaaggcgttgatacagtactggcccagatagatcccgatcatcatgcgcgagccgacaagctgcctgatctgcgcccatttctggctgaacggcactttcgccgtcgaggatttctgatccatgttgatcagcgcgccgccttcagcaatgtactccagctcttttttgtttacgccagggtgctggttgggttcgtggatcactttgagccagataaagctgatgacgatcccgagtccgcccataaagaagaacacgtgcgaccatcccacctcatgggttagccagcccataatgggcgcaaagatcaccgtcgcgaagtactgtgcggagttgaaaatcgccaccgccgttcccctctcctgcgccgggaaccaggccgccacaatgcggctgttgcccgggaaggaaggcgcttccgctaagcccaccaggaagcgcagcgtgaagagcgcgacgataatgccgaagccgctgaagatatcgacgaagccctgcagcagggtaaaggcagaccagatgaagatggaccagaagtagacccgtttcgagccaaagcggtcgagcagccagccgccaggaatttgcccgatgacgtaggcccacgagaaggcggagaaaacgtaacccatgcccacgggatcaaggccgatatcttttgccatttccgagccggcaatcgacagcgtggcgcggtcaccatagttaaaggatgtgacgataaacagcatcaccactatccagtagcgggcattggtgcgcttttcagcgctgctcgctgcgtggcttaatgaactcattgttgcactcctgaaacatagctttcgcctggttcattctgtacagcaccggtagggtaagcagaatgagattggtttttgtcgttttggtacggcctgaagccgttttatcgtgaccggaaaagtatatgaaggagtgcctcttcacctcaccgtgcaaaaacacagtattaaagggcgtgagggaggttgtttagggcataagcccagaggagtggaaggtggttcacggaaatgacgtttggtgcagagtgtaatgccgggtggcggctacgcctgacccggcctggaaaacccgtaggcccgcgcaagcgaagcgccgccgggcagagtgttatttgagaagtgaggcccagttctccacccacgggtttgattcgctttctggctccgggtgctcacccgcatcaatcagcagcatctcgccgacgcgctgggcgctctgctcctgcaacagcgcatcgaactgcttgccgccgccgcagaagttggcgtaagcgctgtcgccgagggcgatgatgccgtagcgaacgtctggctgatagccaagctggtctttaatgccctggaacagcggcacgatgctgtccggcagatcgccctgcccggtggtggaggtcaccaccagaatgtatttatctttatacttttcccagtccgccagctccgggtcttcatagaccgtggctttatgaccctggcttgccagaatcgcctccgcctcttccgcaaccagcagcgagttgccgtacattgtgccgacaaaaatgcctacttcagccatgctattttcccatagtgaatgcgcttactcttcatcctgaacgttgcccgaggcaaactcaaccctttcattttcggggagttgtcccagccagccaaactgtgacagcgcctgcatccagacgtcgtccagccccgcgcggagagtcagtggctcgccggtaaacgggtgcgtcaggctgagttcgcttgcgtgtaacatcagacgatggcagccaaagtgttcggccgcgctgcggttctggcgcaaatcaccgtgtttgctgtcgccaataatcgggtggcgcagatgcgccagatggcgtcgcagctggtgcttgcgcccggttttgggcagaagctcaaccaggctgtagcgtgtggtcggaaatttgctagtggccaccggcatttccgtcgtcgccatgccgcgataatcggtcacggccggctgcgggcctttgtcatcccgggcaaatttatcggcgattttgtccagctcctccaccagcgggtagtccagggtggcggactcggtcagccacccacgcacgatcgcgtggtagcgcttctggatctggtgctgttcgaactgctgcgccagcagacggccagcttcgctggaaagtcccatcagcagcacgccggaggtcggcctgtcgaggcgatgggcggtaaacacatgctgaccaatctggtcgcgaacggtctgcatcaccaccactttctcgtcgcgatccagccagctgcggtgcaccagccagcctgacggtttattcaccgccaccagccactcgtcctgatagaggatctcaagcgtcatgcatcttcaccggcaaacagggcatccagcttttccagttcgaccagcatgacgtcgcgcgcagggtgcgtcgcttcgagcgccatttcataatagggagagacagcaaacgcctgcggcaaggggtgccccccctcaagcagggcgtgcatgcgcggaattaacacccactgcagccactcgaaaggggccagcgtatccaggcaaaagggctgggtgctggcgaacgcttctggctgcggcgcggtctcctgccacagctgatgttggcgcaaaagggcttcgatggcgtgcaactgagcacgaacgctatcgtgttgcgtcatagtaacctcaactgaaaatgtgaacggcgcgcagcatagcattgcgaaaggcagaaataaaaaaagggagcactgtaaaaacagtgctcccggttcgttccgcagcattccagctacaattcgtgctccctgctcatccgtgacaacttttcctgaagcccgaaggcctggtcatccgtctacctttcgcatcctgcacacatcttcctgacgtgtttgtttcatcctgaaacgtcctggccttcctgacccaccgaccatcctgaccggctctcgttctccttcctggaggtgtcccttacgcatcctgcgttatccacttcgcttcatccagaagccttcctgctgcgccatcctgacgagtcctgtttgagaaacgccatcatcctgatgttcgtttctcgtgtcggcttcctgtcgacggagatagaatccgctattccgcttcgtcttacaacccactcagccagcgttgtaagacgcggggactccctaaaaataataggaggaacaactaattcgttgaaaaatagagtgatattaatctgaatttaatgaggtaatactgaatgttccagcgatctctcacaaaccttgtaagagatctctcacacgcgctgtagcagcatggattacagaaggggctcaagtcgggtgaggaaatccgcaagagaaggggcgagagtctcgcgattgcgggtaccgatagtctctttaatcacttcgcctgacaggttacagacggagataacgtccagctcgctgtccagcgtggcaataaagagcgtcggagaaagcttaagacgtttttgcgtgaccagatgaccaatcaggttttcctgaacacgctgcagatcgtcttcgctccaggtctgcaacagcgtcagcgtcatgtccgcaaaacgcgcgggcatatcccctgcaaactgcgtggcataaaacgcatgaacggctggttgtaccacaatgtccattgcccgttcaaccgcatttacattctgctcaccgttattcggcttcggctgccagatcacgtaatcctcaagcgaagagataatgcacggcgaagggacgccatataaatcagcactttgcggccacgtgccctgcttttcatgccatgcgtcgcaatagcgggtcgtgaaggtagtgagggcatttgcagtttcgatgtccaccgatttctctcttcttgtcagacaggataaactcaggccataagtgtacctgtaaagtggctatgaaacatgtcttacgaaaatcatcaggcgttaaccggcttaacgctgggtaaatcgaccgattaccgcgatacctacgatgcaagcctgctgcagggcgtgccgcgtagcctgaatcgcgatcctctggggctgcacgcggacgcgctgccgttcgtgggtggcgatatctggacgctgtacgaactctcgtggctcaacgcgcgcggcctgccgcaggtggcggtgggacacgttgagctggactatgccagcgtgaatctcgtcgagtccaaaagctttaagctctatctcaacagttttaaccagaccaaattcaacagctgggacgacgttcagcataccctggaacgtgatttaagcgcctgcgcgcagggaaaggtgagcgtctcactctatcgcctgcacgagctggaaggccagccagtcgcccacttcaacgggacctgcatcgacgatcaggatatcgaggtggagaattatgaattcagcgccgattacctcgaaaacgcggcgagcggcaaggtggttgaagagacgctggtcagccatctgctgaaatccaactgcttgattacccaccagccggactggggctcggtgcagatccagtaccgcggcccgaaaattgatcgggaaaagctgctgcgctacctggtgtcgttccgccatcacaatgaattccacgagcagtgcgtggagcgcatctttagcgatatccaacgcttctgccagccagaaaaattgagcgtttacgcgcgctacacccgccgcggcggcctggacatcaacccgtggcgcaccaataccgattttgtaccggcgacgggccggctggtgcgtcagtaatataaatattttcacaatatgcgcggtatcttccgcgctttaggttgtgaaacgtcacgcggcagggctattgtaatcaacagggaaagacgataatcgtcccgtaaggagctcacttgattacacatattagcccgcttggctcaatggatatgttgtcgcagctggaagtggacatgcttaaacgcacggccagcagcgatctttatcaactgtttcgtaactgttcacttgccgttctgaactccggaagcctgacagacaacagtaaagaactgctgtcccgcttcgaaagctttgatatcaacgtgctgcgccgcgagcgcggcgtgaagcttgaagtcatcaacccgccggaagaggcgtttgtcgacggacgcatcatccgttcacttcaggctaacctgtttgccgtgctgcgtgacatcctgtttgttaacgggcagatccacaacgcaggccgtttccagcatctcgacctggaaagctcggtccatatcaccaacctggtgttctctattttgcgcaacgcccgtgccctgcacgtgggtgaagcgccgaacatggtcgtctgctggggcggtcactccattaacgaaaccgaatacctttatgcgcgtcgggtgggcacccagcttggcctgcgcgagctgaatatctgtaccggatgtggtccgggtgcgatggaagcgccaatgaaaggtgccgcagtgggtcacgcgcagcagcgctacaaagagggacggtttatcggcatgaccgagccgtccatcatcgccgctgagccacctaacccgctggttaacgagctgattatcatgccggatatcgaaaaacgtcttgaagcgtttgttcgtatcgcccacggcatcatcatcttcccgggcggcgtagggacagcggaagagctgctctatctgctgggtattctgatgaacccggccaacaaagatcaggtcctgccgctgatcctgaccgggccgaaagagagcgccgactacttccgcgtgctggacgagtttatcgtacacacgctgggtgaagccgcgcgtcgtcactatcgcatcatcatcgacgatgctgcggaagtggcgcgccagatgaaaaaagcgatgccgctggtgaaggagaaccgtcgcgataccggggatgcctacagctttaactggtcaatccgcattgcgccggacctgcagatcccgttcgagccttcacacgagaacatggcgaacctgaaactctacccggaccagccggtggaagtcctggccgccgatctgcgtcgcgccttctccgggattgtggcgggcaacgtcaaagaggtcggtatccgcgccattgagcagtacggtccgtacaagatccacggcgacccggagatgatgcgccgcatggatgacatgctgcagggctttgtcgcccagcaccgcatgaagctgccgggctccgcctatattccttgctacgaaatctgcacataacgcttagcggcatctcatcaaagccgggtcgccctgtcgcgcgttccggctttttttattcctgatgtaattcataggcatcacttatatcttttacaaaatcgccacaaccgcaaacgattacctatatctttcaaccgtaaattatcagacttaatccaaattacctgccagaaaatactaaaaacccatttctttacagcgaaagacacctatatcaagggccagtctttcagcgcacatgtcgttggtggtagccttcgcgcgcgtaaattctctttgatgtttttttaacagataaatggtctaaagatgcccacatcataagtggattattgcatttgggatcgcgatcactgatagattcataacgagaatgtatctttccgcccgtcaatagttacgggcgaaaattattaaaaaaccgtcactgaacgaatttcatattaccgtcaggcactttttcatcggatttgactaaaaacctgacaatttgcttcctccaggagatacagatggaaaccactcaaaccagcaccgttgcttcgattgaatcccgaagtggttggcgcaaaacggataccatgtggatgcttggcctttacggcacggcaatcggcgctggtgtactgttccttcctatcaacgcaggcgtcggcggtctgattccgctgatcattatggctatcattgctttcccgatgaccttctttgcacaccgcggtctgacccgcttcgtgctgtccggtaaaaacccgggcgaagacatcactgaagtggttgaagagcatttcggcgtgggcgcaggtaaactgattaccctgctctacttctttgcgatttaccctatcctgctggtttacagcgtggcgatcaccaacaccgttgaaagcttcatgctgcaccagctgcacatgacgccgccaccgcgtgccatcctgtctctgatcctgattgtcggcatgatgaccatcgtgcgcttcggtgagcagatgattgtgaaagcgatgagcgtgctggtgttcccgtttgtagccgcactgatgctgctggcctgctacctgatcccacagtggaacggcgcagcgctggaaaccctgtccctgagcagcgcgtctgtgaccggtaacggcctgctgatgaccctgtggctggcgatcccggtaatggtcttctccttcaaccactccccaatcatctcctctttcgccgtggcgaaacgtgaagagtacggtaatggcgcagagaagaagtgctccagtatcctggcacgcgctcacatcatgatggtgctgaccgttatgttcttcgtcttcagctgcgtactgagcctctccccggcggacctggcggcagcgaaagagcagaacatctcaattctgtcttacctggcgaaccactttaacgcaccgctgattgcgtggatggcaccgatcatcgcgatgatcgccatcaccaaatccttcctgggccactacctcggcgcacgtgaaggcttcaacggtatggtgattaaatctctgcgcggtaaaggcaagagcattgaaatcaacaagctgaacaaaatcactgcactgttcatgctgctcaccacctgggcggtagcgacgctgaacccaagcatcctgggcatgattgaaaccctgggcggcccggtcatcgcgatgattctgttcctgatgccgatgtacgcgattcagaaagtcccggctatgcgtaagtacagcggtcatgtcagcaacgtctttgtggttatcatggggcttatcgctatctctgcgatcttctactccctgtacaccatgttctgattctcacccgcgccgtccccggacggcgcacaccctcctctctgactgaaagcaatggacgcatcatgattagcgtattcgatatcttcaaaatcggtattggtccttccagctctcacaccgtcggaccgatgaaagccggtaagcagttcacggatgacttgattgcatgcggcatcctgcacgacatcacccgcgtggttgtcgatgtatacggctcactttccctgaccgggaaaggccaccacaccgatatcgccattatcatgggcctggcgggaaacctgccggataccgttgatattgatgcgatccctggctttatccaggacgtgaacacccacgggcgcctgctgctggcgaacggcgagcatgaggttgaattcccggttgaccactgcatgaatttccatgcggacaacctgtcgctacacgaaaacggcatgcgcattaccgcgctggccggcgacaaagcggtatacagccagacttactactctatcggcggcggttttatcgtcgacgaagaccactttggtcaaaccagtacctcttctgtcgaggtgccgtatccgtacaaaacggcggcagacctccagcgccactgccaggagacgggcctttccctctccggtctgatgatgaaaaacgagctggcgctgcacagcaaagaggagctggaacagcacttcgctaacgtctgggacgtgatgcgcggcggtattgagcgcgggatcaccaccgaaggcgttctgccgggcaagcttcgcgtaccgcgtcgtgcggcagcgctgcgccgtatgctggtgagcaccgacaaaacgactacggacccaatggccgtggtggactggatcaacatgttcgccctggcggtaaacgaagaaaacgccgcagggggccgtgtggtcaccgcgccaaccaacggtgcctgcggcatcgttccggccgtactggcgtactacgacaagtttatccgtgaagtgaacgcgaactcgctggcgcgctacctgctggttgccagtgcgattggttcgctgtataagatgaacgcctccatttccggtgcggaagtgggctgtcagggtgaagtcggcgtggcgtgctccatggcggcggcaggtctggcggagctgttgggcgcaagcccggcgcaggtgtgcatcgctgccgaaatcggcatggaacacaacctggggctgacctgcgatccggttgccggacaggtacaggttccgtgcatcgagcgtaacgcgattgcctccgtgaaggcggtaaacgcggcacgtatggcgctgcgccgcaccagcgaaccgcgcgtctgtctcgataaggttatcgagaccatgtacgaaaccggtaaagatatgaacgccaaataccgcgaaacctctcgcggtggcctggcgatgaagatcgtaacctgcgattaagcctctcaggaagcctcgttttgcgaggcttcttcctgttttccccaccattcatagtttcacgctgctgacagtgttacccttcacgcattagatagaagggagattatctgtggccgttcatttacttatcgtcgatgcacttaacctgattcgccgtatccatgcggtacaggggacgccttgtaaagacacctgcctgcacgcgctggaacagcttatccgccacagtgaacccacccatgcggtcgcggtttttgatgacgaagcccgcaacacgggctggcggcaccagcgtctgcccgactacaaagccggacgcgcaccgatgccggacgatcttcacgccgaattacccatgctgcgcgccgcatttgaacagcggggcgtcccctgctggggcgcacagggaaatgaagccgacgatctcgcggccaccctggccgtaaaggtggcgagtgccgggcatcaggccacgatcgtttcaacggacaaaggctactgccagctgctctccccgactattcgcattcgcgactattttcaaaaacgctggctggacgcgccgttcattgccagcgagtttggcgtatcgcctgagcaattgccggattactggggcctggcaggcatcagcagctctaaagttccgggcgtggccggtattgggccgaagagcgccgcgcagttgctgaccgattttcagagtctggagggcatttacgcccgtctggacgaggtgcccgaaaaatggcgcaagaagctggaggcgcataaagagatggcgtttatctgccgggaaatcgcaacgctccagaccgatttacacctggacgggaatttacagcagttgcgcttagaacgttaaaacgactacagggtttttgtaggcccggtaagcgcagcgccaccgggcaaaacaaagcacgtattagcgctcgtcgcgacgcccgcctacggccgcccaccagcgacgaatatgcaccgtcacctcttcgcggtcgtgatacagctgacgcgcctggatctccacgttaatcccgtgttcgtccagttgctcctgaatgtaggccaggttctgcgacacctcctcatagcgctttttcatcggcagcttgaggttgaaaatggtctcgcgacaccagccgttaaccagccaggaggccatcagcgcggccactttcgccggtttctcaaccatgtcgcacaccatccatgagatgttgttgcggttcgggcgatagcggaaaccgtcttcacgcagccaggtgacctgtccggtgtccatcaggctttgcgccattgggccgttatcaacggacgatacccacatgttgcgtttcaccagctgataggtccagccgcccgggcacgcgccgagatcgacagcgtacatgccgtttgccagacgctcatcccactcatccgccgggataaagacgtggaacgcctcttccagcttcagcgtagaacggcttggcgcatcggccgggaagcgcaaacgcggaatgcccataaagaaaggagagttgttggtggtgtacgagtagcccgtatagcagcagcccggtgcaataaagaagatatgcaccaccggacgcttcggcgtttcgtagttcgtcagcacgcccgcatcacgcagcgcagcgcgcagcggaacggtgaacttacggcagaacttcatcagctctttactttcgttggtatccgccacttcaacgcgcagatcgccgcccttctccaccacgccctgcagcatgcccacgattggcgtgatgcggtcttccgggggaaggtctttgagcagctcacccgcgacaaacatctggcgcgcaaaaatcagcgagctgaacggcagctcgcgcgccagcttatccgcatcttcaggctgatagcattcgaataccacatagcccgcgttttcttttacgcgggcaaagccgaagatttcgcgcttcgccgctttatcggtaatttccgcggcgcactctttctcaaaccccgggcgacaatataaaacaaccttattcatgaacaacgcccttgcgtttcagacggatagctccgataaacattaatacccaacccgccaggaagctgacgccaccgacaggtgtaacaaacgcccacaggcgtaaatgcgaaagtgccagacagtaaaggctgccgctgaaaagcaccgtacccagcgccagaaagacgctgctccagtaaaaccagatgctgatacggcgctgcatcgccaccgccagcccaaagattgccagcgtatggaacgcctgatattcaaggccggtctggatccagcccatctctacagcgcccaacgacttgcttaagacatgtgcgccaaaggcgcccagtgcaacaaaaataaagccactcaccgcggcaaaaatcagcatgaatcggctggtcatgtttaagtcctgaattgatgcgtgcccggcacacaaacgttattgttcatacctgaagcggaatttttcttgctcgcttgccgctttcgccagtatccactgccggaaggcggctattttacccagttctgcctgactgtcatgacaaaccagataaaacgcattcttgctgaccagtacatcattaaaagggcagaccaggcgacctgcctctatttcggactgcgccatgacgttgttcgccaacgccacgccctgcccgtgaatggcagcctgtaacaccatcgcactgtggctaaagatgggtccctgctgcacgtttatatgtgtaagacctaattgacgggtataagtttgccagtcgcgtcgagaggcatcatgcaaaagcgtatgctgcgccaggtcagcgggagacttcagcgctttgtcgcccgttaacagcagaggggaacagaccggcaggagatattctgcgtataatttctcaacacgcaagcccggccagttaccgcgcccataaaaaatcgcgacgtccacgtcatcggccagcttgtcttcctgacgatccacggcctggattcgaacgtctatccccggataagctgagttaaagcttgagagtcttggcaccagccactgaatggcaaaactgggcaataaactaacagtcagagcaccttttgcactgcgggcctgtagcttacgcgtggcttcagtaagctgcgaaaaaatctctttaatatcctgaaaatagctctgcccctcttcggtcaacagcaacgagcggttgcgtcgacgaaacagcttaaggcccagaaaatcctccagagacttgatttggtgacttactgcggcctgtgtcacaaaaagctcatcggctgcgcgggtgaagctcaggtgacgtgctgctgcatcaaaaacacgtaatgcgttgagggggggcaatcgctttgacatggttatatggcttagatgttaaaggaatttaacaaataggaaacaacgtttaacctattagttttttttatctgagccattataatttgtccgttgaggaactaccagcaaatacctatagtggcggcacttcctgagccggaacgaagagcttttttcggaatgcgtgttctgaagggcttttggcttacggttgtgatgttgtgttgttgtgtttgcaattggtctgcgattcagaccacggtagcaacgctaccaatttttcacttcctgtacatttaccctgtctgtccatagtgattaatgtagcaccgccaacttgcggtgcttttttttcgcctgcgatcggttaatgctcgatctctttcatctctttcacgtccgtgcggttgatctgctgcttgttcccgttagcatctttgtacgaaatcatcccggtatcgttatcggttgtcggtttcccttccgaaacgatggaacgaccatcgttagtgtgcatcacgtagttgttaccggaacaggcgctcagggcaaaagtaaacgcacaggcagagatgattgcagctgtcttattcatgattattctcctttagcaattaatgctattcaaacctcgatttataacaggctaaaacatccgcctaacactatttagcataacctgcttttttggggtcatgaggataagcagacaattctgatagatatcaacctccttgccctgccgcggaaattgcgcgacgatcgtgatattgaaatgaggaatcccatgaacgctttcagtcctgcgcagttccgcgcacagtttccggcgctggccgatgccggtatttatctggacagtgccgccaccgcccttaagccacaggcggtcattgacgccacgcagcagttttacagcctgagcgccgggaacgtgcatcgcagccagtttgccgaggcgcagcgattaaccgcgcgctacgaagcctcacgcgatcgcgtggcgcacctgatcaatgccgaaagcgggaaaaatatcgtctggacgcgcggcaccaccgaggccatcaatatggtggcccagtgctacgcgcacccgctgcttcagccgggcgatgagatcgtcgtcagcgaggcggaacatcacgccaacctggtgccgtggctgatggtggccgaacaaacgggtgcacgcgtggtgaagcttccgctgggcgcagaccttctgcccgatgtggcccgtctccccgagttgattaccccccgcagccgcattctggcgcttggacagatgtctaacgtcaccggtggtttcccggacctggctcaggcgattcgcatcgcgcatgccaacggtatggtggtgatggttgacggcgcccagggcgtggtgcatttccccgccgacgtgcaggcgctggatatcgacttctatgccttctcaggacataagctctacgggccaaccggtattggggtgttgtacggcaagccggaacttctggcaaaaatgacgccctggctcgggggcggcaaaatgattaccgaagtgtcgttcgagggcttcaaaacgcaggatgtgccttaccgcctggaagccggtacgccgaacgtagccggcgtgattggcctaagcgcggcgctggagtggctggcagaaacagacagtgttcaggctgaaagctggagccgggggctggcgacgctggcagaggaagaactgaaaaagcgcccgggtttccgctcgttccgcgttcaggattcaagcctgctcgcctttgattttgtgggcgtgcatcacagcgacatggtgacgctgcttgccgggtatggcatcgccctgcgcgccgggcagcactgcgcgcagccgctgctggcggcgctcggcgtgagcggcacgctgcgcgcctcgttcgcgccctataacacacaaagcgatgttgacgcgctggttgccgccgtcgaccgcgcgcttgaaatactggtggattaatgactcacgctgctttagccggacatccgtttggcaccgtcatcactgaagatacgttaaaacagacctttgccccgctttcacagtgggaagataaatatcgccagctgattcttctcggtaagcaattaccgaccctctctgacgatctcaaggcgcaggcgaaagagattgcaggctgtgaaaatcgcgtctggctgggcgtgagcgtttccggtgagaagctgcacttcttcggcgacagcgaaggccgcatcgtccggggcctgttggccgtattgttgaccgcagtggaagggaaaagcgcggcggaactgctggaacattcgccgctggcgttatttgatgagctggggctgcgcgggcagctcagcgcttcgcgcggtcagggtttgatcgcgctcaacgaggcggtactggacgccgcacgtcaggctcaggcctgacgttccgccttcgccatcatcttcttcagggcgtgagacaccgccacaaagccaaaggaagcggtcaccatggtggccgcgccaaagcctgaggcgcaatccattctctttggcccttccgccgtgcttttcatcgcacacacggaaccatcggcctgcgggtagaccagcgcttcggtcgagaacacgcagtctacgcccagcttgcccttgctgttcttcacgacgttgaagtcgctcttcaggcgttcacgcagcttggcggcaagaggatcctgaatggttttcgccagatcggccacctgaatctgcgtagggtcgatttgcccgcccgcgccgccggtcgtcaccaggggaaccttgtaacgacgacagtaggcgatcagcgccgcttttggacgcacgctgtcgatggcgtcaatcacatagctgtagcctttgctcatgtattcagcgacgttatctgccgtcacaaaatcatcaatcaccgtgacccgacattccgggttaatcaggcggatacgttccgccatgacctccgattttgccaggccgacgctatcacgcagggcgtgaatttgacggttggtgttggtgacgcacacgtcatccatatcaatcagcgtgattgcgccaataccggttctcgccagcgcttctgcggcccacgaccccacaccaccaatgcccacgacgcagacgtgcgcatccgcaaacagctgcagggctttttcaccatagagacgtgccgtgccgccaaaacgctggcgccaggcatcgctgattaccacagacataacacctcagatgtaaaaagggtgaggttctcctcaccctgaacagtaatccgtattgcgctcagaataccacaatcagccgctgaatacgtttccggcacccggtgcggccttaagcacccacacgcgtccgtagtggttataccagcctgcgcggtggcctgcatccgggccaatgccctgatagatatcgaagtgctgccctttgatcgcgccgccaacgtccagcgccaccatcagacgcagctcatactggccgttgaacttgccattgttgtccagtaacgggacctcagccagcagcgtggtgcccgcaggaataatcgaacgatccgatgccaccgacgcacggccaataagcggtaccgcgctcgcccctttcaccggcgcgaagttttgcggtttaaagaagacgaacgacgggttctgctccagcagctcacgcacctcggcctcgctgtgcttttcgccccactcgcggatcgcctgcatcgacatgtcttctttcttcacttcgccgcggtcgatcagcaccttgccaatactgcgataggcgtggccgtttttaccggaatagctgaagaagttaagcggcgagccgtcgccaaaatcaatatagccgctgccctgaacgtccatgatgaagttgtccatcagggagttgctgtaagcaagaacgtagttttcgctcagcgcaccggcgtagatctcggcgcgcgacggcagacggccgcgttttggcggcatacggtagatagggtactggaactcgccctgacgcgtgtgtcgcgcctgaataaccggggtgtaatagccggtgaactggacgttgccgtagttatcggccccttccatctgccaggcgtcgataccaaactggcgcatgttgcgcgtatcgccgcccgcgcgcagccagtcctgcaccgcgctataaacgttgttctgtgcgctgtacagacgcggtgacgcgttgcggatctggtagacctgctcggagaaatcaccggcattaatcggtgcgccgacagcatcaggctgattaactaaagagaaaggctgggataatttcccgtctttatactgctgaccgcgatcggtcggtttggaagaacaggccgcaagaatcgctaccattgcgcccgccatcagatacttcgcccaacgtcctttcattctgtctcgtcttttagttgcccatttccgcgtgatgaagataacaaaccgccagggctaatgaaatgcgatcgcatgccctttggcaaattttgcgcaaaaaatagtccaaacagcgccatgtcgttcaatttgcatacaaaatcatgataaatgtgaaaaaggggttgcatcacaagtctatccgagtatagtgcgcatccacggacgcggggtggagcagcctggtagctcgtcgggctcataacccgaaggtcgtcggttcaaatccggcccccgcaaccaattaaaatttgatgaagtatcttctacgactgtagaaagacggacgcggggtggagcagcctggtagctcgtcgggctcataacccgaaggtcgtcggttcaaatccggcccccgcaaccaatcaaatttgaagaagtaagtttctgcgagagtagaaagacggacgcggggtggagcagcctggtagctcgtcgggctcataacccgaaggtcgtcggttcaaatccggcccccgcaaccaacacttctaaaacaataaacacccttaagggtgtttttttgtatctgtcatttgtgaatttgccgggcgtaaacccggccaaaagatctacccgcgccgcgccagcgtcgccccgtcagagaaatacgcacgaatccctgccagaatcgactccgccacttcctgctggaattttgccgtcttgagcttacgctcctcttccacgttactgataaacgcggtttcaaccaggatggacgggatatccggcgccttgagtaccgcaaacccggcctgttcaacgctgttcttgtgcagcttattgatgttgcccagcttgcccagcaccgctttaccaaacttcaggctgtcgttaatggtcagcgactgcaccatgtcgaacatggtgtggtcaacgtagcgatcgccgcttttgctcacgccaccgatcaggtccgaggcgttctgggtgtccgccaggtatcgcgcggcggtactggttgcgcctttggttgagagcgcaaacaccgacgagccgcttggctgacggctggtaaacgcatccgcatggatcgagacgaacaaatctgcgcgctgcttctgtgctttcgccaccctgaccttcagcggaataaagacgtcttcattacgcgtcatataggcgcgcatattgccttctttatcaatcagcgccttcagacgacgggcaatttgcagaaccacgtctttttcacgcgtgcggtatttccccaccgcaccggagtcttcgccgccgtggcctggatcgagcatgatcacaatcggacgatcgcgccctgctttccccggctgcggaccgctttgcgccggcggaacctgacgctgcagatcgcctttgttgtaatcttccagcagggcaagaagcggatcctgaatatccgtcgcattggccgggtagagatccatcaccaggcgctctttgaacgtcgcgacaggcgccagggcaaacagctgcggcttcacgttctgcttcagttcaaacaccatgcgcacggtttgcggatcgaactgcccgacgcgcgccgatttaataaacggatcgtcgccgcggatctgcgccgccatccctttcagcacggagttgaggttaacgccttcgagatccaccaccacacgttccgggttgctgagggcaaattgcttatatttcagcacgcgattggattcgaccgtcacgcgcgtataggtcgacgatggccagacgcgcaccgccacgacctgactggtggcggcaagaccgacctgactgacgctaagcaaccacattgccccggccccttttaacaaacggcggcggcttattgctgaattggatcccgacatgcttctcccgagcaagaacactgactgatatacaaaatgtccagattgaccgaaaactttaacgaatgacgcataaactgtcatctataaaagggtaaacaatcatacgctaacgcacggattacttatcattttctgtgggtcgcggaaaatttgcgcttgcacacgcggccacaatcgaataaaaatacagaaattacgaataaacattcattaagggttgtgccatggtgaaggaacgtagaaccgaactggtccagggattccgccattctgttccctatatcaacgcccatcggggaaaaacgtttgtcatcatgcttggcggcgaagccattgagcatgaaaatttttccagcatcgtcaatgacattggcctgctgcacagcctggggatccgcctggtggtggtctatggcgcgcgcccgcagatcgacgccaacctggccgctcaccagcacgagccgatttaccacaagcatacccgcgtcaccgatgccaaaacccttgagttggtgaagcaggcggcaggtctgctgcagttggatatcaccgctcgcctgtccatgagcctgaacaacacgccgctgcagggcgcgcatatcaacgtcgtgagcggcaacttcatcattgcccagccgctcggcgtggacgatggcgtggattactgccacagcggccgcattcgtcgtattgatgaagaagccattcaccgccagctggacagcggcgccatcgtcctgatgggcccggtcgccgtttcggtgaccggcgaaagcttcaacctcacttcagaagagatcgccacgcagctggcgatcaagctgaaggcggaaaaaatgattgggttctgctcctctcagggcgtcgtgaatgatgaaggaacgatcgtgccggaactcttcccgaatgaagcccaggcccgcgtggaagcgctggaagccgaaggcgattatcactccggcacggtccgcttcctgcgtggcgccgtgaaggcctgccgcagcggcgtgcgtcgtagccacctgatcagctatcaggaagacggcgccctgctgcaggagctgttctcccgcgacggtattggtacgcagattgtcatggagagtgcggagcagatccgccgcgccaccattaacgacatcggcggcattctggagctgatccgcccactggaacagcagggtattctggtgcgtcgttcgcgcgagcagctggagatggaaatcgacaaattcaccattattcagcgcgataacctgaccattgcctgcgccgcgctctatccgttcccggaagagaagatcggcgaaatggcctgcgtggcggtgcatcctgattaccgcagctcttcacgcggtgaaatgctgcttgagcgcgtggcggcacaggcgcgccagatggggctgagcaagctgttcgtcctgacgacgcgcagcattcactggttccaggagcgcgggttcacgccggtggatatcgattctctgccggaaacgaagaaagagatgtacaactatcagcgccgttcaaaagtgttgatggcggacctgggatgatacgacgccctcaccgtgcggcgagggctttcattcagagggactcaaatatcgcgcccagcccgcttcggcgttccgtgcgggtggcaatcgcctgcaccagcacgcgttcatcggtatacagcgacaggcgctgacgcgcgcgcgtaatggcggtatagatcagctcgcgggtaatgacgggggaaagctgcgtgggcaggatcagcgccgcgtggttaaactcggagccctgggatttatgcaccgtcatcgcccaggcggtttcatgctcgggcaaacggctgggctggaaagacttcacgctcccgtccggcatctggaaccagacgcgcagcccctggccgcagtcgagcgcaatcccgatatccccgttaaacaaccccagcgcgctgtcgttgcgggaaatcatcaccggtcgcccttcataccagcgcgagtgcggggtgcggtttattttacgcttttgcaccagcagctgttccagcctgtcgttcaggccccggacaccaaagggaccttccctcagcgcacagagcagctgatattcaccaaacgcggcaatgacctgctccggcgaacgctgctgttgtacgcccgtcagaaagtgctgatacccctgcagggcatcatccagcatcgcctgatactcttccccggtctgcagcgattttttctcaatatccgtaaaggtgccgtcaaacaccgcagtggttgttcgccggtcgccccggttcacggccgccgcaagctggccgataccggaatcgctgccgaagcggtagcttttctgcagcagacataggctgtcgcgcagcgctcctgcaagcgaatggttttcagaggtgagcgagcatccggtgagacgggctaactcctgagcgcgttctgcggtatatcccaggctggcataggtgcagatatcgcccagcaccgcccccgcctccacggaggcaagctggtcgcgatcgcccaggaaaataacgcgcgcgtgcggcggtagggcatcaatcaaacgcgacatcatcgtcaggtcaatcatcgacgcctcatccaccaccagcacatccaggtgcaggggattaccggcatggtagcgcaaacgctggctgccaggctgggcgccaagcaaacggtgcagcgtgctggcttcgttggggaaaagcgccagctgctccccggtaagcggcagcttttgcagcgcgccgcctaacgactccgtcagacgcgccgccgctttaccggtgggggccgccaggcgaatacggcacttttgctcgcccgacaactgaatcagcgcggcaagcagttttgccacggtggtcgttttcccggtgcccggaccgccagaaatcaccgagatccgacgcgttaaggccacggctgccgccactttctgccagtctgtcgcctcgtcagaagaaaacagcgtatccagcgtttgccgaagctgcgtttcatcgcagggaagcggggcgttggtctcgctgaagaagcgcgccaccgtcagttcgttacgccacagccggttaagatacaaacgctcgccgaccagaatcattggcgtcccggtatcggccccgctcacggcaggcgaaccgcgtagtatcgcctgccagtccacggcgtcacccagcagcgcgaaacacgcctgtaaagccggaggcattttctcatccaccgccagacgcgacagcggcaggcatacgtgcccctcccccgcgtctttgctcagaatcgcggcggcaagcatgacggcaggctcctcgcctgccaccatcatggcaaactgcacgtccaggtggcgaagtaatcgttgttcaaccgcgtccagcagtagcgcctgcatcgtcatgccatctcctccgtgcctgcggcaaacaggttatccattttttcaatcagttccgcagccggacgcgtgctaaagacgccggaacgcgggtcgttggcatccacgccgcgcaggaacaggtaaatcacgccaccaaaatgcgcgtcgtaacggtaatcggcaatacgatggcgcaggtaacggtgcagcgccagggtataaagctggtactgcagatcgtagcgatgcagttgcatagccgacgccatcgcctgttgggtataggctgtgctgtcttcgcccagccagttcgatttgtaatccagcaggtagtagcgcccgtcgtggcggaaaaccaggtcgataaagccttttagcattccctgcacctggcggaagttcagcggcgggcatccggcggacagcggatcgtactcgcggatcagcgcatcaagcgcctcggccctgagggggctggcgatggggagataaaactccatctccacctgcttatctttggcggtcaactggctaagcgagatcccctgggccgtgagcggagcgtgcagaaccgcgcggatccagtcggtgagaaccggctgccattgcgcgtcgtaaccaccactctgtaacatctttagcacccattcttcggaaaccggctgggtaaaatccagttcttcaaacaggctgtgcaaaaacgtgcccggcgaggcgccgcgcgggaactggtgcggcgtcagcaccggctcaacgggtacgctaccggcgcctgcggcatccacgtccagttttggcatcagatcctgcgcaatactctgcccgtgctgctgtaagccagagtagctggtaacgcgccagtcgtcggcaatcgtacgtaccacctgacgggcatagagatctgactcgtgcggctccggcatgtgccagcggctgttgtcgggcagcgatggaatatgcagggcaacatgctcagtacaaagcgattcgatgcactggcgcaggcccgccgcgtctttgggttcaccctgctgaataagccgccccagcgcgctcagatgaaaatcgctctccccgctcttttcgctccgacgccggaacagcggcgcaacgcccaggctgcagtgccagaccgagcgggtcagcgccacgtagagcaggcgcaaatcttccgccagacgttcggcctctgccagctcaacgctggactccgcgttgctgagatcgagcaccgcctcgaacgactcgcgatcgtggtaaaaagcctgatcctgcacgcggtaattggcgataaacggcagccagaccagcggatattccaggcctttcgacttgtggatggtgacgatctgcaccagatgtttatcactctcgaggcgcatctgctggctggaggaattgctgttcggatcggcaatctgctgcgccagccagcgcaccagggcatgctcgctctccagctgcgtacccgcctcctgcaagagttcgctgatgtgtaaaatatcggtcaaacgccgctcaccacctgcggtagccagcatattctcggcaatgtggcgctgagccatgagctcgcgcaccatcgccatcaccccgcgcttctgccatctttcccggtagtggacaaactcttccaccaccgcatcccacgcggcttcgtcattgttgagcgcatcaatatcgcgcgcgttcagtccgagcatcgcgctggctaatgcgctgcgcaatgtactttcccgctccggggccagcacggcctgcagcagccataacatctcctgcgcctccagcgtttcaaagacgctgtcacggttcgagaggtagacggaggggatattcagtaacgtcagggcgtcgcggatgaatgcggcctcctgacggctgcgcaccagcaccgtaatatccgatgcctttaccggggtggggttatcccccttccacagcagcgcctcgcctcgcgctcccgcactgagccagtcacggatttgcgcagcacagtgctgggccatggcattttgatagtcggcaacgccgcagccttccccatccagcagccagaagttcatggcaggctgcgtcacgccgttaaactcgaagcgcaacgaggcatttttcggggcaaattttaccggctgaaacgggatctcacggaacataaacgccgtatccatgcggctaaacagcgcgttgacgctttccaccatgccgggggaggagcgccagttggtatcgagcgtgtagtgcgcggcaacctcgctgcgggccttcatataggtgaaaatatccgcaccgcggaaggcgtagatggcctgtttcggatcgccgattaacagcagcgcggtgtcgggctgctggcgccagatacggcggaaaatgcggtactgctgagggtcggtgtcctggaattcgtctatcatcgccaccgggaagcgggtgcgaatcgcggcggcaagcgcttcgccattttcactgcacagcgccgcatccaggcggctcagcatatcgtcgaaccccagctcgccacggcggcgcttttcgcgcgccacggcttcacgaatttccgtcatggcgcgagcgatcatcagatcgttgagcgtaaggggctccgccagcagggtttcaatcgccacaaacaggggatgctcaggcacaatgccgtcggcttttgtccgctcagccaggaaacgttgggagaatttctccagcgcgtccgggagctggtagccccgcgtctcttcctgcgcccaggcgctgaccttgtcgatccattttccctgattgccacggttgaacttgcgacgatcgatgccggaattttcgataatggcgtcaatctcgccgactgactccatccacttttgcttgatgtctgcaattttcgcgatgattttttcatgccgcgtggccagggtttcatctgccggcggcggggatttgatgaccggcgcttccccctgcagataacgatcgatcgcgcgcagcagtgcttccgggcctttccagagcgcgtgtaccgcttcggcaatatcgcgctgtaaggggtagcagtggcgacgccagaaatccgcgcaggcctgatagcgaagcacggactcatcttcaatgagctgctgttcgaacagcataccggactcgaacgcgttcaggctcagcatgcgctggcaaaaaccgtgaatggtaaagacggacgcttcgtccatctgccgttccgcgagcagcagccactgggctgcctgctgcttatcggcaatctcttccagaaggctcgcgtagagggggttatccgtgctctgacgcaaacaggcaatgcgcagctcgtggatattggtacgaatacggccccgcagctccgcggtagcggcctcggtgaaggtgaccaccagcagctcttccacgctcaaagggcgcggaaaagcggcgttgccgccaagccctaacagcaggcgcagatagagggcggcaatggtgaaggtttttcccgttcccgctgaggcttcaatcaatcgttcaccctgcagaggtaaacgtaagggatcaagggactcagcggtatcggtcattctttcttactccagggcatagattgctgcagcgcgctgacgctcttccagactttccagcctttcgggtttacgtactccgttttcccgttctggctaccggaaacctgagacaggatggtgattccctgcggcttaatgaccgcctgatggaagaagtcggcaaccttctgcggcgtcagctgttttatctcggccactactttatcacgcgaatcaaatttcagattaccgcgatcgaaatctttgctcagctgcgaggcttcttcacccagcgtctgcggcggctgcatcacctgcgcgatgacggcctgctggatctgggcaaactcttccggcttcatggcacgcagttttgcttccacctgcgggaagaaggcctggtaacgctgccagagatacgccggttgtttatcgctgctttgcagcaggaaacccagcccccactgacgaccgacgttcatggaaaaggcaaacaccgcgtagccaagctgctcctctgtgcgtaactggttatagaaccacggctgaataatctgtcccagcacggcgctctgcgctgaactggcgaattcatcgtagcccgttggcacaaagaccgcggccagcgcggaatccgtgctgttacccgctttttcaaagatcacattctgctttttctcaaccagcacgtcctggttgcggcaccactcgtcgcctttagagccgagctgagtgcgaacattctgcgccagggttttggcctgctcctcactcatgttgccaacgatcaggaactccggacgcgtgttggttttcagcgcgtcgcggtacgcgagcacgtcttttaaggagatggaaggcagcagcgcgcggcgatcctcacgctggaaataaggaacctgagacagcatttgcgctggcataagcgccagatcgtaagccttgcccttctcggcagaatccatcatctgggcataccaggatttagcctgctcaagctgctcttccgtcggcgtgtagctgaagtagccctccagcagggcctggaacagctgaggcaagcgctgggtatagccgtttgcattaagcatcaaaccgttattggcgttggtggagaagctgatcccgcccacggcggcctggttgctgagctgatcgagcgcgataccggcgagatagtcattgagcgcgaacatcacctgatttttggcgctgttcatggctttcgggttacgcagcaccacgctgacatcggcctttggctcgctggcgaaatagcggcttggggtgtacacgacgcgcagcgtgggctcatcaatgatgagttccggatgcgggtaatctttcgtcgttttgatcagcgagaagtcatccggaatataggggttcagctccggcagcttcaacgcaatctccccggccttcttctgccagtcggcgaaggtctgggcgctgattttatccacctgataaggggcatcgacaaagtacgccgtcttgttatgcggttcgttcgggctgatgtaccagatgcgggcattctccggcgtcatcatcgccaggcgggcttttaccgccccggcatcatactggtcggcaatatttaccgcgtcgagggtatgttccaccggcacgcggatcatggtgtcagcaagccactccacataatccatgtcgcgggtgatggacgggtagcggaaatcgagatccaacacgtgcgcgagttcatcaaaatagcgcttatcgacgcctttctcacgcagtaaggagaggtagctaaagatagccgctacgacttcatcacggttggcctgtcctttgtcagtcagggtcgcggagatcgccagcacgccgctattgccgttcacaaccggatcggagtcggcgcgaatgccttccgccagcccctgcttttgcagccagtcagacagcgtacccgggctacggttaccaatcagataggtgaccagctcatcggttttactgcggaactgtgccgtgttgttatcaatgcggaattccacgcgcagcactttgcgcggcatggcaggaacgtagtggatcacgatgcctttttgcgcgtcagtgaccaccggaacggttatttgcggcaggtcgatatttttattcggcacccggccaaaggttttggccgccatggctgccagctccggcaacggtttattgctgtagatgaccgctttcatcaggttggcggagtagtatttatcgcgaaacgcgtgcagggcatccagcaccgggctgttcggtttgtcgctcaaggtttccaggttaccaccggagaagcgcgaacccgggtgcgccgggttgatggtttcggcgctgacctgcgccatgcgcataccgtctcgcgtgcgggccatggtcagctcggcattcaccgcattgcgttcacgatcggcgtattttttatccagcaacggcgcggcgatggaatcggcaaggcgatcgaccgccccttccagcgcatcattttcgacttcgagataaaaggccgtgcggtacggtgccgtactggcattgtggctgccgccatgcatcttcagaaattcggacaggctatctggctgcgggtatttttttgaccccatcagcgtcatatgttccagatagtgtgcaagcccaggatgagcgtcaggatcttccagcgacccaaccggcaccactaatgctgacagggatttcaccgcctgcgggtcggaaaccagcagcacggtcatcccgttatcaaggcgaatagcctgatattgacgggtatctttttcgctcttacggatagtttcctgaacgggttgccaaccggagtctgcgtgagtgacgggcgcccaaagggcaataaacaaaacaaacgctttaaacaaggtgctgcctggcattacgacctctttatcacggctacatcattaacaaactgcgtgctggacacgccaacatctctttctttgggtacatcagtccgtgataagaagtgcatcataaatgaacacctttatctgcgcaatttttatacagcgctcaggactgattaaatctaaacaacggcaacaggtagcgctgcgcctcttccgtgatcgcctcaaagtattctggctcgagcgctcgccacaaacgctgataccagacatcctcaccttcaccccgcaccatcatgtttccttcataggcctgcataaacttactgcgcgctttctggagcgaagcctcatccgttaacatcgcatcattctgcgcgtcataacaggcttttatccaggcgccgccactttccggtagtaacaggagcggtttgttcattccctgacggtagccttcaatgtacaaagacagataacctaacgcctgctcggcttccatcggcgggaagcgccattcgccctctttgcgcacgaaaatgcggctttcgcctttatgcccacccgcactgtagacaagatgttccagccagagttgcaatccttgcgaaacgcttagcattgagggccgccagcgcagcagcccatccggctgtacctgggttaaccagcccgtgagctgtaccccgttgcagttgagatcaatttcaatacttttccccggctgtcggcacgctcttacgcgctctgccagagcggtcatctcctggcactgcgcctcccagacgatctccccaaacgctccgtagggcagctgacccgcagcacggtagcgacggtaaaatttgtccgcatcttcctcttcaaccagcgcattcagcagctgcaggtttaactggtagcgctccagaccttccagcgtaaacggttctgcatcaggaatttcactctcttcagagcggaagttgacctgcagtcgctgctggaagaaggcgcgcaccggatgtgcccaaaaccgctgaagctgctcgaaggtcagggtgtcgatggggcgcgggtcaagttcctgaatgaaatcagtatgcgcattcccctcttttttcgccgccggtaaccactcatgggcatagctctggcgctcgccggcaatatagttcaccgggtcaaacggcatgcggctgtggaaacaggtgatatgggctttcaccctctgctcgctttcatcacagttgcgctcttcatctcccggcaggtagtggctctggccgatatagtccaccagctcctgcaccagtacggaggggaaacgctcgctgttgtcctgaatagaacggccgatatagctgatatagagcttgctctgagcggaaatgagcgcttcaaggaagaggtagcggtcatcatcgcggcggctacgatcgccccgttttgggtttgcgctcattaagtcgaaccccagcggcggcagcgcgcgcggatacacaccgtcgttcatgccaagcaggcagaccaccctgaacgggatagaacgcatgggcatcagggtgcagatattgacaggacccgccaggaaacgctggctgattcgctcctggtcaagccgctgcgtcagctcatcacgcaacagcgacagcgggatggcttcgtgatagtgggaattcacgccttcgtcgatgatagcctgccactgggtttcaatgagcgccatcgccgcttcggtgtcattgtccggcagaaagaaatcattgagtaatgccctgcagaccgggagccattcttcaagtggacgcggctgcaacagcgcatatcgccagcgattaagctgcattaatagcgatgctaaatgccccaccagttcagcaattaacccgctggactcatcgtaaggcagcacctcattccactcgccctggctgctttccatggcgtagcccaacagcatacgcgtcaggccaaatcgccaggtgtgctgtccggttgcgggaagctcgaactcctgaacgttatcatcatcgatcccccagcgcacgccagactcattcacccactgacgaaggtagcgcaggccctcttcattgatgttgaagcgtgcggccagcacgggaacatccagcaacgccaggacatcttcggagataaaccggctatccggcagtgacagcagagtgataaacgcctgcaataccggatgcgactggcgggcacgacggtcagatatcgcgtaaggcaggtaccgttcccccgtcgcgctgccaaagacggcctgaataaagggactgtaggtgtcgatatccgccaccatcaccacgatatcgcgtggcgtcagatcgggatcctcctgcagcatcgccagcagctggtcgtgaagcacttcgacctcacgctgcgggctgtgacaaacgtggatcgtgatactgcgatcgtcaggatccagttttcgcttattgtcgctgcgttcgaactcgttcgccgtcacgcccatgacggcgcggttttccagatccagaatatctaactgaatattatgcagcaggcagtccggggcgatctcaacaaaggcatccacatcaccttcacctgaggaagtgatgtctgaaagcatgtgaatgtagtcacgccccagcttcccccacgaggcaagcagcggattgggcaggttctggataccatcttcatcgaaaagctgcccggccgtcgagccgtctttaaacagcgggatggatcgttcttcaaaaaggcgttttcgttggcgagttaccagccgtgcaagccagcgttcgtcgagaatatccccccaatactgtcggcaagggttggtaaacaaaatatgaatatcaatatgtttacccagcgcattcagcgccttcagatagacagggggtaatgcggatatcccgcagataaaaacgcgtgacggcagtcgggccgggcgttccgacgcattttcaagtatcgagataaaccgatcgtagagattggcacggtgccacttaggctggcccagtctctcggtatgctccaccagcgctttccacagcggggcctgccatatttgcgcctccggcaggccttcaaccaactcgcccgcttcccaacgaattaaccagtcggagcggtaaacaaggtattggtcgtagagatcggcagtgcgcgacgccagctggaacagcttgcgcttgtcggtatcgtcattgaggtagtggcgcagcatggcaaattcatcgtgctgcagcatttccggcagcagcgccatcagcttccagctcatggcctgtttgttgaaggcgctctgctccgggatatccggcaacacgcggacaaacatctcccagatgaagctcgcaggcagcgggaaatcaatattcgcggcaataccaaacttgcgggaaagcgacatttgcagccactgtgccataccggtgctctgcaccagcaccatttcaggctcaaaaggatcgtcaagccgctcgcgctcaacgataaactctatcagtgcttccagcacatccagacgatttgagtggtagacccttaacatagacgctcccgactactggctaaccgggcaatgcagacgcgttaactcaccgcgccgacccagaggagaaataagtgtaaccgtgatgctgacacatcctgcgagcgttgtctgcccccgactggcctgccagcctgccgggagaacatttgttgagagctgagactggttccaggcatggtgccagagctggcgatactgattaaacacggtgaaccgcgccgccagcgcccggtgataccccgacagtgccgtcacgaccaccaccagcagcatcatcgccagcaggacctcaaccatgctaaaccctttttctctgctcacggcagctgacataacgcactctccttaagggggcaaaaatcgctccagccgtgaggcgaaaagcgcactatcccgtcgacgatctctcccctgcgccagagcagcaggtcgttgccgccggctatcagcagtacccgcgcctcgctcagctgacgcaaacacacccgccatgccgatgtcgttttgcactggactggtggcgctgacgcccagcgctgaacgcgcccccactcaagcgcggactgaaccgtcgcctgctgctgaagcgagcggctctcaccgccaacgagcgcactgaacgttgtgacctgctgattgaggcccgtcaggatcaaagtaccgagcaccagtaaaagcagaaccagcgccagcgaagatatgccgcgttgacgattcacaggttgtaccccgtgaccgtatacaacgcctgccagggttcccctttttcatctttacgcctcgcggccagttcgatattcagctctggcgcaaaaccggcatgttcgactctcctcaccacaaagtgtgctatcgtaagcctgtccgggtccgtgagcttttcccacccttttccttcacacgacgtcgcgccacgcagggtttccagcgcccccgattccagacgaaaaccggtgctgtcattttctgatgcgctgctatcccagtagccgttactgttggcatcccaccgcgcaatgatgcagcgcccctgcctgccgatcgtcagcgcctgtccctggcaatttcccgcgcagtaccccgcacgctgaagctgtttgccgagggcgaacaggcgttgccagacctcttcttccagctctcgctgggcagattgcagtaataccgcccgctgcaatccgggtaaaaagcgcgatgcgcttatcaataacaggctgctgatggccgtagcaatcagcacttcggtaagcgaaaagccgccctgtctcatcgacattgtcctccctcggagaccttacacatcctgatgcgccctccgtctgaaacgataatcagccagtctccggcacgactttgaacgcgtatccgccctgcccatgccgtatcccgtaatccatagaaccccagcgacggcgtgacctcgccgatcgcgacctcaggccagagggggagcagcacaaaaggactgtccttctcacagccctgcacggcagagctcaccagacagtccctgtcgccaacccgctgacgggtaatttgatggtcgcggttgtggcggttggcatggttgcgcagaaacagcaggtaatctcgcacctgactggcggtttgccacagccgctgatgccgttgccagctgtcccagccgtacagacctgaagcgctgaggataacgacaagcgaaacagcgaccagcgtttcgataagcgtaaaaccgttctcttttttcataccgggagtgtggcgaagcgccgtgaacatgacgagcatcggattatcgttttgcgaggcgttatccgcagcattaggagggttgcagcgcgttgcacgctttctggatagcgcttcgggaaacgggagaaaggcgaaaaaaaaaccggcgctaaagagcaccggttatgtcaggctttaccgcatcagatcgcgacaggcgctttgatgcccggatgggggtcgtagccctcaatctcgaaatcttcaaagcggtagtcgaagatggatgccggtttgcgtttgataatcagcttcggcagcgcacgcggttcgcgggtaagctggagatgcgtctgttccatatggttgctgtagagatgggtatccccaccggtccagacgaaatcacccacttccaggtcgcactgctgcgccatcatatgaactaacagcgcatagctggcaatgttaaacggcaggccgaggaacacgtcgcaggagcgctggtagagctggcaggagagcttgccgtcagcgacatagaactggaagaacgcgtggcacggcgccagcgccattttatccagctcgccaacgttccaggcggaaacgatgatgcggcgcgagtctggatcgtttttcagctggttcatcacggtggtgatctggtcaatatggcggccatcaggcgttggccatgcgcgccactgcttgccgtaaaccgggcccaggttgccgttctcgtctgcccattcatcccagatggaaacgttattttcgtgcagatacgcaacgttagtatcgccttgcaggaaccagagcagttcatgaatgatcgagcgcagatggcagcgctttgtcgtcaccagcgggaagccttcttgcaggttgaagcgcatctggtggccaaaaatggagagcgtaccggtaccggtgcggtcatttttcggcgtgccctcatcgagcacttttttcatcaattcaagatactgtttcatggttcctcaggaaagttgttgctgtggacgacgacgatacgcccaaatcatcataatggcacccgcgacgatcatcggaatggagaggatctgccccatgctgatgtactgtacccactcgccggtaaactgggcgtccggctggcggaagaactcgacgataatacggaatgcaccgtagccaatcaggaacagcccggaaacagcccccatcggacgtggcttgcggataaacaggttgaggatgataaacagcaccacgccttccagcgccagctcgtacagctgggacatatggcgcggcagcacgccgtaggtatcgaaaatggactgccactcagggtgcgacggcaacagcgccatgtcttccgcgcgcgaccccgggaacagcatggtaaaggaaacgctcgggtcgacacgcccccacagctcaccgttgatgaagttgcccagacgaccagcgccgagaccaaacgggatcagcggtgcgatgaaatctgatacctggaagaagttgcgtttggtgcgtttggcaaaaatcaccatcaccaggatcaccccaatcaggccgccgtggaaggacatgccgccgtcccagacgcggaacagatagagagggtcattcaggaataccgggaagttatagaacagcacatacccaatacggccaccgaggaatacgccgaggaagcccgcatagagcaggttttcaacttcgtttttagtccagccgctgccaggacggctggcgcgacggccagcgagccacatggcaaaaatgaagcccaccaggtacatcagaccgtaccagtgaagcgaaacaggtcctactgagaaaatgaccggatcaaattccggaaaatgcagataaccactgttcatctgtcaccacaagatgttgttattccgctgaaagtggacagcggtagaaatgcgattctgccgtaagcagaggctccaaagttgcgaatcatagcacaaggcgggcgcggaggatgcgcccgagatgtaaaagatgtgtatagggttttatgcgcgctggtgccctctcccacagggagagggagaaaggctttagcggccgccgcggatcagaccgcccataccgcgtcgttccataaacgccgcgacctggtggcgaacctcagcagccagctgcgcctcaaggctacgctctgccagttctcgggcatcattgatgtcaatatgccgcaacagatacttcacgcgggcaacagcgcgaccgttcatcgacagatggcggtaccccagaccaatcaggatcgcaacgcacatggagtccccggccatttcaccgcacaggcgtaaatcaatgccgtactgctccgcttcacgggcaatcatcgctaaggcgcgaatgatcgccggatgcaggctatcgtagatactggcgacgcgggtgttgttacggtcgacggccagaatatattgcgtcaggtcgttcgtgccgacagagataaaatcaacccggttcgccagctgcggcagcataaagaccatagacggcacttcaagcatgacgccgatccgcggtttcggaatcgcataaccgatcatctcttccacttcacggcctgcacgttcgatcaaccgacgcgcttcgtcgatctcatcgatgctggtgaccatcggcagcaggatgctgagattgcccgtcgccgcgttggcgcggagcatcgcgcgaacctggatcaggaagatctcaggctggtcgagcgtaatgcggatcccacgccagcccaggcacgggttttcttcgctgatcggcatatagggcagctgtttatccgccccgacgtccagggttcgcagggtgacaggtttgtcgttaaacatttgcagcatgccctgatactgcgccacctgctcctcttcagaggggaaaccgctttgcagcatgaacgggatttcagtacggtacaggccaatgccgtcgatgcggctgcccagcttctcttcatgctcagggcttaaaccggcgttgagcatgactttgatccgctcaccgctcttaagctgggcgggcaggttaacgtcatcttccgccagcttgcttaattcattctcttcgctgataagacgctggtattcctggagcagaaccggctcaggatcgaccagcagctcaccgcgatagccgtcgaccaccagcgtacggcgatgaagcaccgacggctgaatgtccgcccccataacggtagggatacccagcgcgcgcaccataatggcggcgtgcgagttggcggcaccatcgcgcaccaccacaccggccagcctgtcctgcggcagttcagccagcgtcgttgccgagagttcatcggcgaccagaacaaaccgttttggccaggcgtttggcccctgaatggtgtcatcaagatgaaacagcaggcgctgccccagggcgcgcagatcgcctgcgcgctctttcaggtaaccgtcggtcagtgccgcaaattgatcggcaaatttttcgatgaccttcttaaccgcccactccgcgaccgagcctttatccacttccgcaaaaagctcacggcgcaggcgcgcatcggaaagcaggtgcgaatagaggtcaaagatggcagccgtctctttttgcgcgcctgcggcaaagcgcttgctgtagcgacgaaattcattcgcggcctcttccagcgcggcggtaagccgctcgcgctccagcgcttcatcaagcgttgaggcttcgtaaacctgctccatgagcggcagcgtggcatccatccagccttcagcaatcgccacgcctggcgaggccggaagggcacgaatgcgcgtatggcgatactggccaaagagcgcggcaagctgagactgggagaggatcgccgccatctgcgtggccagcgtgacgaggaatgactcctcgctttcgtcgtactgacgtagctcacgctgctggacaaccagcacgccgagaagctggcgacgctggataatcggcacgccaaggaaagcgcggaagcgctcttcttttacggaaggaatgtatttaaagctggggtgtttttgcgcgtcagcaaggttaatgggttcagccagtcgcccaaccagacccacgataccctcatcaaatgcgagcgttacggtgcgtccacgcggttttttcaaaccacgggtcgccatcaggtaatagcagcgccgatcgtggtcggccagatacaccgaacagacctcggtctccatcgcaagacagatgtcggtgaccagaatattcagcgcctcgttcagacgcggcgcgctggccaccttctcgactatttctcgcaagcgggtgagcatgatttgcgtagcttaacctcttttacgtcgccaggcaggtgcgctctgcggcttaggcgggatctcctgaagctgcatcaccacacttgcaaactctttcatcaccctacggtaaacatcgcgcttaaatgacacgacctgacgaacaggataccaatagctcacccagcgccagccatcgaactccggcgtactgctggtttgcatattgatgtctgaatcgttgcccaccaactgcaatagaaaccacttctgtttctggccgatacaaaccggctttgtgtcccaacgcaccaaacgtttcggtaacttgtaacgcaaccagttgcgggtcgaagccaggatgcgaacatcttttcggctcaaaccgacctcttcaaaaagctcccggtacatcgcttgttctggggactctccaggattgatcccgccttgcgggaactgccaggagtgctgaccatatcgacgggcccacatcacctggccctgacgattacaaattactattcctacgtttgggcggtagccatcgtcatcaatcaccggactaccccaaactaaaccttatatatgaatgattgtttcacactacagggaggcggtaaaccactctcttacaggcctgcaacctaataacaattgaataactcacaaatatgtgcggagttataaacagaagtgagacagcaaagggaattttattcaccttttctgtggatatagttgtgaagaagtgtctgattaccgatgaacaacctcaagcgccgcgaaagacccttttataccccacctcattaatatgattattttcatagtgttatacgtatttacataaacaaaaaactgattagcgtgacgatcgtcacatcagggatcgtcgcactgatgaaagatcgaacagcgtcggttttatccacagattgtgccaataacttagtcacaatttgtttgaaaattcgattttcatcgcacgtcaaggctgtaaatggaaacagtagtcagggttatgcccagttatcccatttttctgtggataacatggtgtaagatcctgttcattgtcagtgaccagatttgaacaaccggttttctcacccaggcggaacgatttcagaccaataaaaaatcctataaatcatagagatgtcatattggtacagaaatagttaaactctatccacaggggacaatttcttcgtttattttttaatcaaaaggttaccgtcatgcacccgcttacacccttgctctcaccaccgtccagcgagagccagttgctactgcaggcacagcgtctggctggcttttcgcttggcgagctggcggcaatggccgggcttccgatcccaaaggatctgaagcgggataaaggctggatcggtatgctgctggagctgtggctgggtgccagcgcagggagcaaacccgagcaggattttgcagcccttggcgtggagttaaaaaccatcccagtagaccgccagggcaagccgcttgagaccaccttcgtctgcgttgcgccattaaccggcaataccggcgtaacctgggaaaccagccacgttcgccacaagctgaagcgcgtattgtgggtaccggttgagggtgagcgtcagatctccctggccgaccgacgcgtcggcgcgccgctgctctggagccctgacgaggatgaggagcatcagctgcgtctggactgggaggagctaatggacatgattgtgcttgggcaggtagagcgtatcaccgcccgacacggagaagtattacagctgcgtccgaaagcggccaacagtaaagcacttaccgaggcaatcggcgcgcagggcgagcctatcctgacgttgcctcgcggtttttatctcaaaaagaatttcaccggtgcactactcgcacgtcatttcctgttgaaaacatagttttttacttattttgagagctctcgaacataatcgactgctttttaagattttaccgcttcctcaagtcgccatatcgggttaatactagattatgatttgatacaagccagatgaggacgataacgatgaaaaaatgggcagtgttagtgtcagcagtcggtttagcgtttgctgtatcgggctgtagcagcgattacgtcatggcgacaaaagatggtcgaatgatcctgaccgacggcaaacccgaagtcgacgatgataccggtctggtcagctaccgcgaccaggaaggcaataaaatgcagatcaatcgcgacgaagtctcgcaaattatcgagcgataaacagagagaggtcagtcgcttgctggccattttgatttttttcttccccttttgcttcccctctgccatgtttatattcctttgtcgggcacggcctgacgcggtctataagtctattgaggaagccggctatgcattatcaccgtatcccccacagcgctctggaaattagccaactggggttgggcacgatgacatttggtgaacaaaacagcgaagccgatgcccatgcacaactcgattacgccgtcagccagggcattaacctgattgatgtcgcagagatgtaccctgtaccgccacgtcctgagacgcagggacttaccgaaacctacgtcggtaactggctggcaaaacgcggcaaccgtgaaaagctggtaattgcctccaaagtcagtggccccgcgcggaacaacgataccgggatccgcccgaaccagatcctcgatcgcaaaaatatccgcgccgcgctggatgccagcctcaagcgtctgcaaaccgactatctcgacctctaccaggtgcactggccgcagcggtcaaccaactgctttggtaagctcggctacagctggaatgagagcgcccccaccgtgacgctactggaaacgctggaagcgctgaccgaatgccagcgtgcgggaaaaatccgctacattggtgtctctaacgaaacggcctttggggtcatgcgctatctgcacctggcggataagcacgatctgccgcgtatcgtgactattcagaacccgtacagcctgcttaaccgcagctatgaagtgggtctggccgaagtgacgcagtatgaagaggtggagctgctcgcctactcctgtctcggcttcggcacgctgacggggaaatacctgaacggtgcgaaaccggccggtgcgcgtaataccctctttagccgctttacccgctacagcggcgagcagacgcagaaagccgttgccgcctatgtggatatcgcgaagcgtcacggtcttgaccctgcgcagatggcgctggccttcgtgcgtcgtcagccgtttgttgccagtaccctgctgggcgcaaccacgatggaacagctgaaaaccaatattgagagtttccatctgaacctgagtgaagaggtgctagcggagattgaagcggtgcatcaggtttatacttatcctgcaccgtagcctgatacttttgcccggtggcgctacgcttaccgggcctgcaggtgctcaaacccaggccgggtaaggcgaagccgccacccggctatatatcaacggcgacgttgccacatccacaagcccgcaatcgcaatcgcaaacagcccgccaaatccgacgccaatccccaccaccggcacacccacttttaccgccagcgagtagagtcccagcattaacagcatcgccaggttttcacccaggttttgtaccgcaatggcattgcctgccccgacggtctgcttgccccgctcctgcagtaacgcattcagcggcaccacgaagaagccccccagaataccaatcaggatgaggagagcatacgcgggcaataacgcatgctgcagcgagaagataagcaccacgacgccaatcaggatccctgcgggcatgcagcgtgcgaccgtctccagcgtgaccagcttcgccgccgcgcccgccccaaccacaatgccgatggccaccatcgcattaagataggttggcgtcgcattatcagtaatgcccagcgccaccggcacccacagaaccagcaagaagcgcagcgtgacgcccgcgccccagaacatgctggtccccatcagggagaaacgcgtctcaccgttatgccacagcacgcggcaggcggtaaagaaactgccggtcatcggtttaaatcgccaggattgacccgggcgagccgcaggcagcttcggaataaacaggttcgccacgaccgccccgccatacaccactgcacacacgcccagtgccgccaacacatgccagtcggccagcacgccgcccgcgacggagccaatcaggatagaggcaatagtggatgactccatcagaccattggctttcaccagcttatccccggtggtcaactcgccgagaatgccgtacttcgccggggagtaggcggcggctccaatgcccaccagcgtgtagccaataaacggattgaagccaaagcaaatgctggcggcacccagcagcttgaggccgttggcaaacatcatcacccggcctttcgggaagctgtccgccacctgccccacaaacggagcaaagataatgtaagcgcccacaaacaccatctgcaggatcggctgactccagtcggggtaaaactcggctttcagcagcgccagcgtggcaaacagcagcgcgttatcaccgaacgcagagagaaactgcgcggcgatgacggccatcatgcctttcgacctgagggatgtgttagtgtgtactgactcacgcattttgctgttccgcctcttcaaccatgcctttcagggtcacgaaatcgggcttcccgctgcccagcaccgggagctgtttcaggtagcgaatatcgcgcggcacggccagttcaggaataccgtgttcgcgtgcatagctcagtaatctgtcgcgcttaagctcactgtcggtcgtaaacagtaccagcgcctcacctttgctggcatcgctcttcacgacggtggcgtgcatcttctcggcggacacggccgtcgccagctgctccaccatttccagagagaccatttcgccagcgattttggcgaagcgtttcgcgcgtccctgaatctgtacaaagccctgctcatcgaaacggacgatatcaccggtgtcgtaccagccggtttcaacctcgccgttgacgttctccgccgtcggcgcttccagcacgcccggattttccacgcgcagatacccgttcatcacgtttggccctttcagctgcagacggccgccgtcctctatgcccggcaccgccagcagacgcgcgtccatccccggcagaatgcggccaaccgttcccggtttcgccgccatcggcacgttaatcgagaccacgggcgcacactcggtcacgccatagccttcgagaatgcgcagaccaaacttgtcctgccagatctgacgcgtgctctcctgcagtttttctgcgccagccaccacgtaccgcacgcgatagaagtcatacggattggcgaaacgcgcatagttccccaggaaggtagaggtcccgaacagaacggtacagttacggtcatacaccagctccggcacgatgcggtaatgcagcgggcttgggtaaaggaatacttcagcgccggtcagcagcggcgtaaacagccccaccgtcaggccaaaggagtggaacagcggcagcgccgacataaagcggtcgttcgcggtaaagtcggcgatgcttttaatttgctcgacgttcgccagaatgctcttgtggctgtggacgacgcctttcgggttgccctccgatcccgacgtgaagaggataatcgcgtcatcttccggctgctgtttgacctgggccagacgcggcatcagcagatgcgcaaaaatccacagcttgtcgccggtggtcacgtccgctttcagatcttccaggaagacccagcgcacctgagtgagctgctcgggaagatgccagagcttgcctttgtccaggaactggcgggaggtgaatacggtattgatttgcgcagcggttatcgcgctggtcagccccttcacgcccgccgtgtagttcatcatcgccggaatacggccccgggaaaccgcaccgaaaatcaccgccgcgctgatgcccgcgttaggcagcatcaggccaatcttttcgccctttttgctgtacttctccagaatacggcccacaaacagggttttggtcagcagcttgcgataggtatccggagtaaagttgatgtcttcgatgcagtttttcttcgcgccatagcggtactgcgcggaaagcagggattcgtagagcgtttcgcgcgggcgcacggccatacgcgcttccatcatgatctgatgcagcatttccccggcgattttacggcgatcgcgggcacgcggcgcgtcgggcatcggtaatgacgttggcggcaggatatgcagcgtgattttggggaacagacgctgcttcaccagccccttcagacggctgaaatgggtcagctccgcgccttcaatacgcagcggcaccacggtcgcttttgacttcgccgcaacaaaccccgcgccgtcgtagattttcatcagcgaaccggtcacggagatccgtccttcagggaaaatgaccaccggacgcccctgctcaaccagacgtaccagatgcttaatcatcatcggctttgtcgggtcgagcggcacaaaatcaatcagcggcgagagccagcgcatgtaccactgctggctgatggaggtatacaccgcaaacaccggacgcacgggcaaaaacagcgccagcaggatgccgtctataaaggaaacatggtttggtgtgatcaaaacgcgttcgccgctaagcgcccgggtgtcgccagtgatgcggatgcgaaaaagaatacggaaaagcgtacggaagaacccaaatagcatctcaactccctttgccagccagtgtggagggttattagtaaatggtggcagattacacgagaagtgataagggagcgacagcaaaagtggaggcgaaaaaaaacctgcgcatccgcgcaggttggtgcaagagatgagtacgaaaccgtactaagaattctcaccaatcaatacctctgggatctcaactgtatcaacctctttaacgcccttgctatcggacaatcgcaacagcctgaggcaaagtgtaactaaaggttcagtttcacatttttcagacatgactgggcgtgtaacgattacaccgccaggggtgtgctgcgtcacgtttgtggagagcggaaatccgctccccttgaatgcacggcgcttttccgcaacactatttggtgtgtaaacgcttacccccaataagaaggtaatgaatggcgacaataaaggatgtggcccgtctggctggcgtgtcggtggcaaccgtctcgcgcgtgattaatgattcaccaaaggccagtgacgcatcacgtcaggcggtacaaagcgccatggaatccctgaattatcatcccaatgccaacgctcgcgcgctcgcccagcagtccacagaaacgattggtctggtggtgggcgatgtttctgatccctttttcggcgccatggtgaaagcggttgaacaggtttcctatcagacaggcaattttttgctgatcggcaatggctatcataacgaacaaaaggaacgccaggccattgaacagctgatccgccaccgctgcgcggcgctggtggttcacgctaaaatgatcccggatgccgaactgattcacctgatgaagcagatgcccggaatggtgattatcaaccgtatcattcccggctttgagaaacgctgcgtggcgctcgacgaccgctacggcgcctggcttgccacgcggcacctgattcagcagggccatacccggattggctatctctgttccaatcaccccatttctgatgcggaagaccgtctgcagggctactacgatgccctgcgtgaaaacgggctgccgtgtaatgaccgtctggtggcctacggcgaaccggacgagagcggcggtgaacaggccatgaccgaactgctgggccgcggacggaatttcacggcggttgccagctataacgactctatggccgcaggggcaatgggggtgttgaatgacaacggaattgaggtaccggcagaaatttcgctgattggcttcgacgacgtgctggtctcccgctacgttcgcccgcgtctgaccaccgtgcgctacccaatcatcaccatggcaacgcaggccgccgagctggcgctagcgctggctgaacagcgccagccgccggaaattacccatctgtttagcccgacgctggtccgtcgtcactccgttgcgtcgcctgcagaagcgcagagcgaataacggtagaggtgcacccgcgtgttggggtattccagcccatcaccgatatactgccagccgtaacgttcgtaaaagtcgcggcaggcagaccagagatggagctcctcatacccggactgcgcggcgtaagtgataacatgccgctgaagttgtcccgccagccccttgcctcgcgccgcgtcgtcaacgtagagcgccgccagccacggacagagatcctgacgggtgatcaaatcgcagcgccagagtcccaccgtgccaagaagctgttcgccgtcaacggcaataaacgtcaacggtaatgccccaggcgtctggctgtgctcaacaatgctgtggaaaaatgcccgaggaagcccttcgccaaaggcctgccagatccagtcggtaacctgctctgcgaagtgtggcgccttgtaaagcgggaggatgacagccttattcatgtttcacctgcattttctcatgtatttactggcctgatgctccagcccggttcggtgattatcttaccagagtcaggcaattgagtttgacttcaggctggccggacgaatcgttaccaaaaagcgtgatcgtggcagagtttttgcgcttcccgcatcgcttatacggcataagctctgtggtaaactgcagatcgttacgtggaagcaggaatatagaatggcaacaatgctggatgtatcactgcgcgcgggcgtgtcgaaggccacggtatcgcgcgtgctgaacggcacaggtcaggtaaaagagagtacgcgtcagcaggtgtttgctgcgatggaagagctgggctatcgcccgaactttctcgcgcgctcgctggctaaccagaccagcaacagcattggtctggtcgtctcgacctttgacggcttttattttggccgccttctccagcaggcgtcgcggcagaccgaaactcacgggaaacagctgattgtcaccgacggtcacgacgcgccggagcaggaagagcaggcggtgcagatgctcgccgatcgccagtgcgatgccatcgtgctttacacgcgctacatgagcgaaaaagcgatcgtcaaactgatgaacaccgtgaaaacgccgctggtggtcattaaccgtgaagtgagccaggcgccggatcgctgcgtgttcttcgaacagcaggatgccgcgtttaaggccgtggattacctgatcggccagggccatcgggagatcgcctgtatcaccgtcccgatccacactcccacgggtaaagcgcggctgatgggctatcgcaaggcgctggaaaagcacggtatccgtctggacgagcgtcggataaagtacggcgatgcaggaatgacgcggggatacgagctttgcaaggaattgattgccgacggagtaccgtttagcgccctgtttgcctgtaacgacgatatggcgctgggtgcgtccaaagcgttgcaccaggcggggctgaaaatcccgcaggatatttcgctgttcggctttgacgatgccccaagcgcgaaatggctggagcctgcgctctcgtcggtttatctgcccatcgacaatatgattgtcaccgccatcgatcaggcgatccggctggcaagaaaccagccggtcgatgccatcccgccgtttaccggcacgctggtgttacgcgattcggtcacaacggggccgtactttcatcagatgagttctaaagccagcagttcctgaatggtctggcgacggcggatcagccgcgccttgccattatcaaacagcacttccggcagcagcgggcggctattgtagttagaggacatagacgccccgtaggcaccggtgtcgtgcagcacaagataatcacccggcttaacctctggcagcgcgcgggtctccactttgccgccctcctgctgggtaaacacgtcacccgattcgcacagcggccccgcaacgaccgtctcaacgcgcggcgcctgcgttaaatcgcggccgtcggcagccagggcggtaatgtggtgatagctaccgtacatggacggacgcatcaggtcgttaaagcctgcatcaatcaagacgaagtggcgagaccccatctctttcacgctgcggacctgagaaaccagcacgccggcttccgccaccaggaaacgacccggctcaatttccagcttcaccgcgtggcccagatgcgcggcaatttgatcgcgcgcggcgctccacagaccgtaatagtgatcggtatcgatcgcctcttccccttcgcgataaggaatggagagaccaccgcccgcagagatcgcctccagatcctgaccgaagtcgacaacctgacgcaccatcgcgccgcacacctgttccaggtggccgtaatccaccccagagccaatgtgcatatgaatgcccaccagcttcaggttgtagcgctgtaacacctccagcgcggcaggcatgtcggcataccagatcccgtgcttgctgttttcgccgccggtattggttttttggctgtggccatgaccaaagcccgggttcacgcgcagccagacgcggtggccgggagaaacctgaccgagctgctcgagcatatccacagaaccggcatttaccgggatctgcagttcgtgaacgcgcgccagcgtcgcatcgtcgatcacatcggcagtaaagacgatcgcgtcgctgtcggcttttggatcgtatccggctaccagcgcgcgctcgatttcgccgagtgaaacggagtcaaccttcacgccctgctcgcgcatcaggcgcagaatatgaatattggagcaggccttctgggcaaaacgcaccacgtcgaactgatgcagggcggcgatcttctcgcggacgatctgcgcgtcgtagacccacaccggacagccaaactcggcaggcaggcgcagcaggttgtcggcgttcaaatcggtatcagtctggttcagcgggcgtggcatggtcttctccggataaatgcgttttgatgattacgccacagcgcaaggagaataaaaaatatcgttttatcgcgagtctatgcaaaaatgatatggacagttctctgctttcaggtgccctatgcccgccgttaatttacgtcatatcgagatctttcacgccgtgatgaccaccggcaatctcaccgaagccgcacagatgctgcacacctcgcagccgacggtgagccgcgagctggcgcgcttcgagaaagtgctggggttgaagctgttcgaacgcacccgtggcaggcttcacccgacggtacaagggttacgcctgttcgaggaagttcagcgctcctggtacgggctggacagaatcgtgagcgccgcggaaagcctgcgcgagtttcgccagggcgagctgtcgatcgtctgcctgcccgtcttttcgcaatcctttttaccgatgctgctgcaaccctttctggcccgatacccggaggtcagcctcaccatcgtgccgcaggaatctcccctgcttgaagagtggctttcggcacagcgccatgatttagggctaaccgaaaccctcaccaccccagcgggcacggcgcgcacggagctgctctcgttagatgaagtgtgcgttctgcccgccgggcatcggcttgccggtaaggcggtgctcacgccggaggatttccacggggaaaactacatcagcctgtcgcagaccgacagttacagacagctgctggataccctgtttgccgagcatcaggtcaaacggcgaatggcggtggaaacgcacagcgcggcctcgatttgcgcgatggtgcgtgccggcgtcggcgtcgcggtggtcaatccactcacggcactggattatgccggaagcgggatcgtcattcgccgctttagcgtgtccgtcccgttcaccgtgggcctgatccgtccgctacaccgtccggcttccgcgctggtggatgctttcaccgaacacgtcatggagcacgcgcgtcaggtggcgcttcgcttacctgacctgcaggacccactatgacagcataaacgccacggcatccgcagcatggatagcggtggtatcaaataccggaagagggcttcgctcaacgggtaccagcaaaccgatctccgtgcagccgaagatcaccccttcagccccctgctgcgcgagtttttcgatgacgctgacgtagaaggcgcgggaggtttcgctgaaggtgccgagacagagctcgtcaaagataatctgattgatgcgcgcccggtcttcttcttcagggatcaggctttcgatcccaaacgcgctgcgcaagcgcccgcgatagaaatcctgttccatggtgtagcgcgtgcccagcagcgctacgcggcgcatcccggatgccgcaattgcgcgcccggtcgcgtcagcgatatgcaggaacggcagcgagcagcgatcctcaatatgcgacgccaccttgtgcatggtattggtacaaagcaatatcccctcggcgccagcccgctccagccccagcgccgcctggaccaggatcgccccggctttatcccactcgccgctcgactggcaggcttcgatatcatgaaaatcaacgctgtgcagcagcaggtttgcggagtgcagaccacccagatgctgcttaaccccttcgttaatcaggcgataataagggattgtcgattcccagctcattccacctaacaggccgatcgttttcatcatccctccttttcgttgatttcttcttttaacacaaccggtgccaataaaaaaaggcgctctcttgagcgccttgttaatctgcagggtttattccgtcaccggctcggggagtggattacgggtgagcatcgcctcgcgcagtaaaacgctactgcaggcaaacagtgcccccaggagcgccgccagaacgacaatcagggccttgcctggaccatcctttttcaccggcatggagggagagagctggtaccggaatggctcaagtttaacatccgcaaaggagagctttttcaactgcgccagataatattcccggttctggaaatccgcattcagctcggtcacgtccttgagatttttttcaatctgcagcttttgcgcgataccgtcagcaccgagcgcaacagagtaatccggatcgtcttttaccgcctgcccgttgctgtagaccggcttcttgatgccggcggcattcgcgacttccagggaataattcagccgctgcaggttggtattgtgaatattggtcaaacggacgcgatccagctctagctgctgctcaacgactttcgttttcagcgcgatctggttgcggatattctgcactgtctctttctcaacaatagccgcgatataattgatgtatccctccagaacggattgcgcatcgcctgctgtcggcgcagtgaagtttaatgtccaggagatatagggggttttatccgcgtcttttccctgatcgttattcaccgctttcattctgtctgagatattgactatcgcccgatgcagctcaagcggatccacctcagcgtctttaagctgcgacatcacgtaagaagaggatttcagatactcttcaagcaatgactgcgactgaaactttttaataaaaagatcaaagacttccggacgggtaatcttcacgtccacatccagcacctgtaacgccaccatcatctggcgcagcgggttccactgcgactgttctgccggggtgatcaccgctttactggtccatttttgcggcagcaaaaatgaaatggccagccccacgagagcaaaagcaagggtaacggccacgatgcgctttttagccgccgctaaaaccgctaataaacctaaaagatctatttctttagcgtgttcgttacgggtggaataatgggggaaatcaatatctgtgctttttttgaaatccatttctgacataggaattcttctttctcttgatgctacgcatctttgttcattgatcgctgtggctcaataatacaatagattaagaaaaatcctaatcccaaacaccattatctgactacccctgccagagttagtagtgagtttcatcacgttataattgtgattaatctccctttccacctccggcataggttaaacatgtaaacaggcaatccgatcacacgccaatattccgcagcttctccccggccatcagcttgcgctcgatgtgttccagcgtcacgcctttggtttctggtatcagccagaacgtgacgccaataaatgccacgttcagcaccgtatagagccagaacgttcccgctgcaccaatcgcgtccagcagcgtcaggaaggtcgcgccgatgatcatgttcgatacccagttggtggtcgtggaacaggtgatgccaaagtcgcggcatttgagcggctgaatttcggagcacaggatccacaccaccggcgcggcgctcatcgcgtaacctgcgatacacatcatggtcatcccgacagaaagccaggagagtccgctggaagccgtgccgttatcaaactgcatcaggcagtagccgaggatcagcgtgccgagcgccatcacgctgaagccaattttcagcgccggtttgcggcccgccttgtccacggtgaatacggcaataaaggtggcaaacatgaaggtcagcccgaccaccagggtggcgatcatctgctgttcggtggtggtgaaccccgccattttgaaaatgcgcggcgcgtagtacatgatgatgttcatgccggtgaactgctgcatcgcctgcagcagcatgccgaggaagaccgcccggcgcacgttgcggttgattttaaacagcgcccagcccccctgcttgagcttcaggctttcgcggatctcgttcagctcctcgcgggctttttcagaggtatcgcgcagcatgcgcagcacctcttccgcctccacgtggcgccctttttgcgccagccagcgcgggctgttcggcaggaaaatcactaagacaatcagcaccaccgctggcagcgccagcacgccgagcattgcgcgccagttgccgctgtagctgaagtaggtgtcagacagaaacgccagcacgatacccagcgtgaccatcagctgatacatgctgatcatcttcccgcgcacgttctcgctcgccatttcggagagataaagcggcgccgtgtaggaggcaatccccaccgccacgcccagcagcacgcgggaaagcagcagaacctcaacgtttgcggcaaaggcggagccaatggagcccgcgacaaaaagaatcgccccggccatcaggctgtatttgcgccccaggcgaaacgagagccagccgttgaacagcgcgccgatggccgcgccgagcatcatgctgctcaccacccactcctgcaggcggctgctcagggtaaagtgatcggtaataaagggcaatgcaccggcaatgacgccaatatccagtccaaataacaggcccgccacggcggcggcaatagagacaaactggttcatgcggcgagtatcacgcagcgcagcgggcattagggtagagtcatttatagatgtcatattttcctgcctgaacagtgaaattcgttaagtgaaattacgagatagcgagaaaaagtgtcaggcgggaaaaggtgaagatatggattatttcgctgcgacatagcgttctgtgatggacattacaatttcaactaacgctgaataatcacatgcttttactaatcatctaatttttaaagattaaaagtgtgatggctgtcgttcatgactttttagtatggattttccgtgtttatccatatggattttgacaatttttaagcaaaaaaaacctctgcccaaaagcagaggtccagacccgatgcgggctatcgcgccagccagccgccatcgaccgccacggtgtagccgttgatgtagtccgatgccgacgaggccagaaagaccaccggccccatcagatcgcccggaagcccccagcgccccgccggaatgcggtcgaggatttccgcgctacgctgctcgtccgcacgcagctgctgcgtgttgttggtcgccatgtaacccggcgcaatcgcattcacattgatgttgtgtttcgcccactcgtttgccagcaggcgggtcacgcccatcacggcgcttttggaggcggtgtaagacggcacgcggataccgccctggaacgagagcatggaggcaatattcacgatcttgccgccgttcccctgcgcaataaagtgctttgccgccgcctgggacatgaaaaatacgctcttgatgttcagatccatcacgtcgtcccagtcgcgctcgctgaagttgatcgcatcttcacggcgaatcagcccggcgttgttgaccagaatgtcgatgtgaccgaattccgccaccgcgcgatccagcagttcatgaatggcatcgattttacgcaggtcggcggtcaggctcaggaagcggcggcccagggccgtcacgcgctcgagggtttccgtcggttcaacgatattaattccgacgatatcgcagcccgcttccgccaggcctaacgccatcccctgacccagcccggtgtcacacccggaaaccaccgccacttttccctgcagagagaatgcatccagaatcatgtttattccttactctttcagagcctgtcactcacaggcaggtttatgcgtcactgcccgcgactagcgcagatcgctgaccgcaacatggtccatgtcatcaaagacctggttttcacccaccattccccagataaaggtgtaggcttttgtccctacgccggagtgaatagaccagctcggcgaaatcaccgcctgctcgttatgcatcacgatatggcgcgtttccttcggctgtcccatcatgtggaacacgcaggcgtcctcatccatgttgaagtagaagtagacttccatgcggcgctcgtgggtatggcacggcatggtgttccacaggttgcccggcgcaagttcggtcaaccccatgctgagctggcaggtctccagcacgtccggcacgaagtatttattgatggtgcggcggttgctggtgaggttgtcgcccagcgtcacgggcgcgacgtctgccgggctcacttttttggttggacaggtggcgtgggccggcgcgcagttgtagtagaatttcgcaggcctgctggcgtcgatgctggcaaaaaccacgtccttcgcccctttacccacatacagcgcctcgcgatggccaatctcatagcaccgtccgtctacggtgatggtgcccggcccgccgatgttaatcacccccagctcgcgacgttcgaggaaataatttacgcccagctgtttaccgacctcaccgcccacggagacgcttttcgtgacgggcattattccgcccacaacaatgcggtcgatatggctgtaaaccatggtgtacctgtcagcctcgaatatctgctcgactaaaaatgccttgcgcagcccctgcgtatccagcattttggcgtgcgcgctgtggatgctttctctgacgtccacggtaacctccagatgtggtcatgcccgaaggcgggaagtaaaacgaaacagcgttccgttttacataatgagcacatactatcggcataacgtgggcttttcaattatatttaaaacgacgtttcatttttattttttgtttatcgcggaattgatgcccggatcacgctaaaaccgtcgggagataaagatcacgataaaaaaaacctcccggaggaggtctttttttaatgaggaaaaattagcgttcaatggccagcgccaccccttgtccgccgcctatacagagcgtggcaatccctttgcgggcgttgcgcttcttcatttcgtggaccagcgaaaccaggatccggcagccggacgccccgatcgggtgccccagcgcgatcgccccaccgtttacgttgacccgcagcggatcccactccagcatttttccgacggagatcgcctgcgcggcataggcttcgttcacttcgatcagatccacatcagaaagctgccaccccgcacgctccagacagcgacgggtcgcatagaccggcgcgatccccattaacgcaggatcaacgcccacgctggcgaatgccttaatacgggccagcacgggaagatcgagttcgagggctttgctttcgctcatcatcatcacggccgcggcgccgtcgttaatggaagaggcatttcccgctgtgaccgagccctgcatttcaaacgcaggattcagcctcgccagcccttcagcgctggcgtcggtgcgcggctgctcatcggtatccacgacgataacctcgcccccctgacgctgcgtgctgaccgggacaatttcgtcgcgaaaacggccggaatcaatcgccgcacgcgctttttgctgcgagcttaacgcataggcatcctggacctcacggctgatgccgtactcgcgcgccaggttttccgccgttacgcccatatgataatcgttgaaggcatcccacaacccgtcatgcaccaggctgtcgagcagctgactgttgcccagctgtgcgccggtacggctgtcggtcaggacgtgcggcgcgcggctcatattctcctgcccgcccgcaatgattacgtccgcctcaccacactgaatggcctgcgtcgcgagatgcagcgcttttaatcctgaaccacagacgtcgttgatagtgatagcggagacggtattgggcagtccgcccttcagcgccgcctgtcgcgcagggttttgcccggcaccggccgtgaggacctgtcccagaatcacctcatcaacttcttgtgctgcgatcccgctacgttctaccagcgctttcaccaccacgctgcccaggtcaaccgccgagtgacgcgcgagcgctccctgaaaacagccgatagctgtacgcaacgcacccactattacgacatctttcatcacgacctctgtgttaaatgacatgacgatagtagaggattgttactggcaattatcttaattgtttaaaaatagtgagtttaatcacaaggatcagcgtgcatcctgcagatactgccgcagccagcttccggcaacgccgggaggggatcgtttattccacagcagatcgatgccgatcgcccgcggccagccgggaacattgagctgtaccagggatttcgcggcggcaaattcctccaccagcgcgcacggcaagacgcaccagccaaatccctgtaccgccatactcaagagtaacaggtaattcggggctgaccagacgggcccgcgcgcgatctccgccccacgctcaagataggtgctcagccgcagctctcgccagccgtgcagctcgtcactctgaacgtcatcctgcccggcaagcggatgcgtggtcgcgacatagatcgccatgcgggtctgcatcggcagccggatggcgccaatatccgtaggataaccgtctcgcgcttcggtgaggccaatctgcgcgcgctccttttgcagcagatcgatcacgtcctcctcctcgccaatcagacattcgaattccgtatggggaaagcgcgcatcaaactgcttcatcatctcttccagcacatccgggttgagggtatcggaaaggacaaacgtcagacgcgcctccgtttgcgccgtgagcgacaccgccagctcatccagccgcgtgctggcggcgagaatagcctgcacgtagcccagcacctgttccccctgggccgttaacaccggctggcgggccgaacggtcaaacagctcgaagcccagatcggcttcaaggttggcaatggacgtgctgaccgtcgactggcttttacgcagccggcgtgcggccgcagagaaagagcctgctgcaacggtctcgacaaacgcggtcagggcttcgggtgaatagcgcataacctatctacttttacgatggatactatctttaatatatcagctttagcgataaaataggccacatcaacgcccatactggcgaattaacgaggtctatcgctatgcaacatcaggatgcactccaacgtaaactgccggagcggatctttcatgctgtctgttttgaagggattgcgacggcgatcctcgcccctaccgcggcgtggcttatgcagcgttccgtggtggaaatgggtgggttgaccattattttggccaccaccgccatgctgtggaacattatttataacgtcggcttcgaccgtttctggcctgttcagcgcgtcaaacgtacggcaaaagtgcgtgcgctgcatgcgctggggttcgaatgcggctttattgtgattggcgtgtcgattgtcgccgccgtgctgggcgtcaccctgctgcaggcattcacactggaaataggtttcttcctgttcttcctgccttacaccatgttctataactgggcgtacgataatctgcgtgagaaatttcttaagcgccgccagcaacgacgcgccctggcaggctgaaccgcctctggccggacgcccgttccggcccgacgtcttcgaagcaactgcgctcttaaggcataactatggtaaattgcacgccattctgatggtttgatagttgatacgttgctctaatgtcgaaaatttggtcaaaagatgagactctctggagtttcgctctctacggcacggccgtgggcgcaggaacgctcttcctgcccattcagctgggctccgcaggcgcaatcgtcctgtttattaccgccctcgtggcctaccccttaacctactggccgcacaaagcgctggcgcaatttatcctgtcgtcgaaaacgaaaggcaacgaagggatcaccggcgccgtttcgcactattacggcaggaagatcggcaacctgatcaccacgctctatttcatcgccttctttgtggtggtgcagatttatgcggtggccatcaccaactcgttaaccgagcagctggcaaaacacctgacggtagacaccaccgttcgcgtgctggttagcctgggcgtggtgctggtcctgaatctgatcttcctgatgggacggcatatcacgataaaagtgatgggcttcctggtgtttccgctgatcgcctatttcctgtttgtctcgctctacctgatcggcagctggcaaccctcgctgctgaccagccagatggccgtcgatcgccatacgctgcaccaggtctggatttcgattccggtgatggtgtttgcgttcagccacacgccgattatctcgacgtttgccgttgaccgccgcgagaagttcggggacgaggccatggctaaatgcaagaaaatcatgaaggtggcatacctgattatctgcctgagcgtgctgttcttcgtcttcagctgcctgctctctattccgccgtcgtatattgtggccgccaaagaggaaggggtgacaatcctgtctgcgctgtcgatgatgccctcctcaccggcgtggctggggatttccgggattgtcgtggcgattattgcgatgtcgaaatcgtttctaggcacctattttggggtgattgaaggggcgacggagatcgtgaagtcgtcgctgaaccaggtgggcgtgaaaaagagccgcgcctttaaccgcgcgatatccatcatgggggtgtcgttaatcacctttgccgtctgctgcattaacccgaacgccatttcgatgatttacgccatcagcggcccgcttatcgccatgatcctgtttatcatgccgacgctgtcgacgtatctgatcccctccctgaaaccgtaccgttccataggcaacctgctgacgctgatcgtcggggtgctgtgcgtgtcggtgatgtttgtcggctaattccctttcctgcccggcgcgctgccgggcaggccattcagtcccggcctcctgcttacagcggaaaaggcctgtcctgcaccactgttttcatgacaagcgttgagcgaagatgctgcacgccgggcatagcggagagcttctcgtcgtaaagcttctggaaagcggaaaggtcgcgggtcacgacgtgcatcagataatcaggatcgccaaacaggcgctgggccagcacgatctgcgggatctcttccaccgcctcttcaaacgcgctgaccgccttgcggtcaccctctttcagcgtcgcgaacactatcgccaggaagttaaaccccattttggcggggtcgaggctggcacggtatcccgttatggccccgctttgctccagcgcccgcacgcgacgatggcacggcgaaaggctcagattcacccgctcagccagttcggtaagcgacaggcggccgtcagactgcagttcagcaagaatttttctatcgatgctatccatgtggaagattttctcattttcaccgtgttatgagcataatattgaaagcctatttctcagtgttagcgatattctttttcgcaacgtataacgcactgcgggagtatttcaggacgatggaaatgagtattgtggccggcttttgggtggtttcgtttctgctcatcatgaccccgggggccgactgggcctacgccattagcgccgggattaacgggcgacgcgtggtcccggcggtgatggggctgatgtccgggcatctgctagccacattgattgtggtggcaggcgtgggggtattgattgctcaacatccgctggcgttaaccgggctgaccgtggcgggagccctgtatctcctgtggcttggcataacgttattgcgtcacccggccgtaccggaaaaggccatccagcatgcggataactggacgcagtgggcggtgaaaggactctgcattagcggccttaacccgaaggtttttttgctgttcctggccctgcttccgcagtttacagacccaaccggaagctggtcgatagcgatgcagatgtccgcgcttgggatgatgcactttatcacctgtaccctggtctatctgctggtggggtatggttcgaaagcggtgctggcgacccggccacaggcggcccgtctggtgagcagggcatcgggagggttgatggtgctgatcgcgatggtattgctgcttgagcaggtgagataactgtcttttttgccgggtggcgctgcgcttacccggcctacatttcacaacgatatcaattaattgcacaattcattgtaggcccgtgcaaccgtagcgccgccgggcgaaactcacaaatcgcacgttgtcagcagtctgaaaaaacaccggccatcgccggtgtgagttacgcccgaatatcgtcatattcccgcgttttatcaaactcatgtttcgcaaacgggcacagcgggataattttgcggttctcaccgcgcatcttctccaccactttcgccaccagctgtttaccgacgccctgccctttcaggctctcatccacatcggtgtgctcgataatgctcaggtgctcgccggttggcacgaagacaatctccgcgacctggttgccgttcgcatcattcacgtaaaacttgttatggccttccagaatatccatggttcctcgcttatttttggcgatacttcagcgcaccgctcgggcaggtatcaatcacgcggacaaccgtttcaacgtccacttcatcgggaataatccacggtttacgtttcagattaaacagctttgcgctcccacgcacgcagttaccggagtgtttgcagatcccggtgttgaagtagacgtcaattttctcgccggtataggcccggtaacccgcatccagtagctctttatccatgacattgcctctgtaattattatcgtgctgaatgaagaatagcctgacgggatcctgatggctatatacccgtcatacttcaagctgcaggtgcgttggctgcactcactcaccccagtcacgtacttatgtacgctcccggggattcgttcccttgccgcgttactcggcctgtggcctcgccccttcggggccagcgcaagcgctgttcaaaacggcaagccgttttgtcctgcaactcgagttatttagggtataacgccgaaaacgaaaagccaggtcacaactcttttcttgccagattgcgtccgctatttgcccatgtcaggctcggcaaatgtcacttttacataacatccgcaggttgaatgaaacgcagactctcttttcaggtaaagctgtttttagcgctggtgtgcttctcctgcctgctgttagttctgctgggaacgatcctgtttcattttattgaccggcagctccatcacgatctcggccagcgcgcccgggtgcaggccagccagatcgcgctgatgccgggtctggcggccatggtcgcggccagagatattccggggatagcccggttaattcagccgctgcgcgcccaaagcgatgccagctacattgtgattggcgataccgaggaacagcacctttatcattcggaatccccggagcgcataaatttaccgatgatcggcggggataatgctgaagtattacagggcaaaaccattatttccgtgcgccagggcgggattggggtttcactgcgcagcaaagcgccgatctttaacgcgcagcaccaggtgattggtattgtctcggtcggctatctgacctcctatattgccaatattaacgcccgcattctctggcagtccgggctgtacggcgcggggcttcttctgctgctgtttatgttctcctggctgtttacccgcaatctcaaaaaacagatgttccgactggagccgaaagatatcgctcagctggttttgcagcagcgcgcgctattagaagccatgtatgagggggtatttgccgtcaacggtgagaagcagctgattttaattaaccgcgccgcacgagaaatgctggatatccggcaaagtgaaaaagcgcttatcggcaaaccgctggaagacgttctgcagacgtcgccgggctttttatcccagcgctacgcctcggtgagcagcggtagccacgaccagattgccgtgctgaaccagcgggaggtaatcgtcaaccgcgtcgcgattgaggtcgaacccggcgttgaaagcggctgggtctacagctttcgcgacaaaaatgacatcaacaccctcagcagccagctcagtcagatcaagcgctatgccgataacctgcgcattatgcgccacgagcagctgaactggaccgccacgctggtgggcttgctgcagatgaaacactatgacgaggcgattcgctacattcaggtgcagtccgaaggcgcgcagcgcgtgctggactttgtctccgcccgtttttcctctcccgcgctgtgcgggctgctgctcggaaaatacgtcagcgcgcgcgaaaaagggatcgaactgctgtttgatcccgcctgccagctcacccgcatgcccgccacgctcaacgaaacggagctgatgtccattattggtaacctgctggataacgcggtggacgcgacccttaaggctccggtccccgcgccggtggaactctacatttctgaccgaaaccaggagctgctgatcgaggtggccgaccggggctgcggggtggaggatgcgatgaagccgcatattttccgccagggattcagcagcaagccggaacgtgaaaacgacattgtgggtaccgagcacggtattggcctgtatctggtggcaggatatatcgacaaggctggcggcagcattgagattgccgacaacacgccacaggggactattttttctgtgtttattccgaatgggcaaaagcatgacccgagcacttgatgttgtgatcgttgaagatgagccgcacctggcggagctgcatcgcgagtatatcgagcagaattttcatttgcgcgtggtgggcatcgccgcgtcgattgagcaggcatgccgcctgattcgtcagcatcagccgcggcttatcctgctggacaactatctcccggacggtaaaggcgtggagctcatcgataacccgctgctgaaaagctacgaatgctcggtgatcttcatcaccgccgccagcgatatgcaaacctgcagccacgccatgcgcagcggcgcgtttgactacctcatcaagcccgtctttttccagcgcctgcacgcctcgctggagcgttttatgcgcttcatccacaccgtgcagcaggtgaaggtggtcgaccagcatgcgctggatcgcctgtttcatctgcctgccgcggaagcctccgtaacgccatccacaaagggcattgagccccagacgctggagcggataaaacgcctgttcgccgagcatcccgacagcgcgatgtcggttgaagaggtggtggaaaacgtggggatcagcaaaaccacggggcgtcgctacctcgaatactgcgtggagagtgggttaatcagcgttgaaatgctgtacggcaatattggtcatcctcgccggttataccgcaaagccccgataaaccgtaatccaaaaccgttcgttggctaacgttcgcggattttatggtgttaattgctgaaacgacggcgacaatcacacttcggaatcattgccctcgcctccctattgtcggaggcgcgctttacgctatgttgacaattagttcctcaaatgtaactaaaaggttaactataatgtcgaacacgttccgaatttctctgcttaccgctaccgtactgttctctgcttctgcactgtctgccctgccgcagggttatcctgctgagtatcaaaaagtggttgatgccgccacgaaagagggcaaggttgtcatctattccaccaccgacatcaaagctgccggcccgctgatccagggcttcgaaaaaacctacccgggcattaaagtcgaatacaacgacatgaacagcaccgagctgtacaaccgtttcatcagcgaacaggcttccggcggcgtgagcggcgacgtggtctggagctcctcgatggacacgggcctgaagctcgccaccgactacgccatggagtacaaatctccggagcaaagccagctgccgaaatgggcggtctggaaagataaggcctacggcaccacctatgagccggtggtcttcatctacaacaagcgtctgatcccggctggcgacgtgccggactctcacgccgcgctggcgaagctgattgccagccagacggacaaattcaagaacaaagtcaccacctacgacatcgaaaaatcgggtctgggctttatgctctcggtgcaggatcacaacgccgatccgaactactttaagaccctggccgacgtcgccaaagggggcctgtcggtgcagtcgtctaccggcaccatgatggagcgcgtctcctccggtgaaaacctgattggcttcaacatcctcggttcttatgcggaagcgcgtgcgaaaaacgatccgtcgctcggcattgcctatccaaaagactacaccctggtgctgtcgcgcgtgtcgttcatcagccagcaggcgcaaaacagcaatgccgcgaagctgtggctggactacgtgctctctgaacaagggcaaagcattctggccaaccaggcggacattccctccattcgtaacgatatcgaagggaaaaatgatatcgacggcctgaccaaaatccttggcaacgcgctgaagccgatcccggttgatgaaacgctgctggaatacctgcagccgaaaaaacgcctggaatacatcaaagagtggcgtaccgccgccggtaaataagcgtctgagcgcggcgctgaccgccgcgctcccttatcgactgagttcgtttttctgggctgcaacaccagggataccccatgaatacattacgcagaaagtggcaaagcctgccgcgaggcatcgtcgtgctgataaccgccctggttatctacacgccgctgtcgtttatcgtgatccagagcttcctgtccgcgccgttcttttcgccgtcaaaagagtggagctttgaatcatttgattttattttcaccgaccccgatttttataaggccctgaaaagcggctttattctggctttcgggctggtctttatctctatcccgctgggcggcgtgctggcgtttctgatggtgcgtaccgacctgcccggtcgccggctgattgagccgctgatcctggtcccgattttcgtttcaccgatggtgctgggcttcggctacgtggtggccgccggtccggtgggctttctctcccagtgggctgaggcgctgattggctttgtgccgtggaatatctacgacatgtcgagcattgtggtcattgccggcctgacgcacgtcccgcacgcctatctgtatatctcgtcagcgctgcgcagcgtgggctccgacgtggaagaagccgcgcgcaccgcgggcgcgtcgccctggcaggtgatgacctccgtcagcctgccgatggtgcgcccgtctattctgtacgccaccgtgctgctgttcttcctcgggctggaagtgttcggcctgatgctggtcctcggcgacccggaaggcaacatggtgctggcgacctatctctataagctgacgaacaagatgggtaccccgtcctataacctgatggcggcggttgccgtggtgctcatctgcatcaccatcccgctggtgatgctccagcgtcgcctgatgcgcaccgccaaccgcttcgtcaccatgaagggcaaggcctcgcaggcccgggctctgccgctgggtaaatggcgctgggtggctggcgcggtgattgccttctggctcaccgtcaccattggcgttccgctgctcggcgtggtgctgcgcgcgtttatctccaactggggcgtgggcgtttcgctgtgggacgagctttctctgaacaccttccgtaccatctgggcgcagcccaacctgctgcgcgccatcgtcaactccatggcgattggcgtgattggcggcgcgctggccgtggtgtgctacctgtttgtcggcatcgccatgcaccgcaagccggataacaccacgcgtttcctggactacagcgtgctggtaccgcgcgccgtgcctggcctgctggcaggtctggccttcctgtgggtgttcctgttcctgccgatgtggctggataactcactgaaatccggctggctttccgggtttgcctggaccgactggatgcgtgaaaacgtcatcgtctggctacgctcgctgcgcagcaccattttcagcgtctggctggcctataccgtggtgtggatggcttacgggctgaggcttatctcttccacgctgctgcaggtagggccggagcttgaagaggcggcacgtagcaccggggcgacgcgcgggcagatcacccgccacgtcaccatcccgctctcccgctacggtctgatcggttcgtggctgctgatgttcctgatctttgaacgcgaatactcaacgggtgtgtacctgctttcacccggcacggagaccatcggctcgatgctggtttccctctgggccgcgggtgccatcgatatcgtggcggcgctctctttcattaacatcctgctggtcgtggtaggtctgggcattgcccttcgtttcggagtgaaaatacatgattgaattagcggttgacgatctgcacttaacctacggcgacaatcctgttttaaaaggtgtctccatgaacctgaagcgcggcgaagtggtctccctgttaggcccctccggcagcggcaaaaccactctgctccgcgccgtcgcgggtctggaaaaaccgacccagggctcgattgtgattggcaacaataaagtttacgacggcacgccgcgcagcgaggtcccggcggaagagcgtaacctggggctggtattccagtcctacgccctgtggccgcacaaaaccgtatttgagaacgtggcctatccgctcaagctgcgcaaagtcccggccaaagagatccagcagcgcgtgcaggacgtgctggaccagcttggtctgggccatcttggcaaacgtcacccgcaccagctctccggtgggcagcagcagcgcgtggcgattggccgcgcgctggtgtacaacccgccggtgattttgctggacgagccgctttccaacctcgacgccaaactgcgcgaagaagcccgcgtgttcctgcgcgagctgattatcaagctcgggctatcggcgctgatggtgacgcacgaccagaacgaagcgatgtccatttccgaccgcatcctgctgctgaacaacggcaaaattgagcaacagggcacgccgcaggagatgtacggctcaccgaaaacgctgtttaccgccgaatttatgggcagcaacaatcgcctgcacggcaaggtcaccgaagtgcgcgacgggagagcgcgcatcgaagggaaaggctgggtgctgtggggccaggcgggcgaaggggtacagagcggtaatgacgccacggcggtgatccgcgtcgagcgcgtcgcggtggtcgaggggccaggggaaaatcagcttgagctaccgctgctcaccagcatgtacctcggcgaccgctgggagtacctgttccgtacggcgggggatgactttgtgatccgcgcgtacgggcatgaggtgcgggatccgcagcactgtcatctttcgttgccggagaggcatgtgtgggtgttcccgaaagggtgagggtgagtgtgagaggaaaaggctgcgggatgcggcctttttacgttagaaaacaggaacagcgtaccaaagatcctcattttttagatagggcagaatcgtctgccggggcggagtaaatctataaatgactttgaggtctctgttaaacccgtggtgattcaggggcggtttgcccccttattctttgggataagaaaattcagcagtgactaaatgcgattctgatttacctgattggacgtcatacgcgaagttataccgctctccaggtgcaaatttaaatccgaacacaggaagacacccgcccttttgaacatacacgggcttgtcatcaaaaatcttgtgaagagagtcgctattatcactgttgatttggatagcagtgatccgttcctgtggctccagtggtgataccacacaaacttgattatctttgattaatgccgttgtagattcacgatctaccattcgatcacccggcccagggcatcccgttaagatgaatacaacacccagcaacattttgttcttcatgtttaacgccccttccctgttacgattttctggtaaagcgaagggacatcctgcaacaaatctacgcccctgtacatccccatgcgccctggtctctgatagtaagaccacttactgaccccataaaccagcagtaaccagtaatcagctaaaatagaggcttgctgttcaagagagtaatcagtgagtttttctttatccagcctgtaggtatattcagcagcccagctaaaagctccccgcattctcacccattgcccgtgttggtgttgccagacatgccccagctcatggatgaaaacatatttatcttcgatgaaaaccgagtttgcggaaaagtcttctctgtacatcgactttctgtaccataactctccgtttggagtcatcgcgtagttttgtttttgtagtccgaatggtaaataactgtcgcaatgaatccagacacggctataaactatcgaatcaccgaacaccctacgagccattgcaatctcgcctaatgtcatccggcgtaattttccttcctctgcctgtgcgctcataaactgtcctccttgtatgatttatatcagggtatccagggagcataaaacgcgcaactaacagatttaggacaatagaagacataaagccccgttgatgatgcagcaacaagcggagcgtagcgacttcatcagattgtcagagggatcacaccttatcaggataaccgtgtacccttgcgggagcgtggttgaaacgctgatacagcctacatatcgtttgtaggtacttgtttcaccataaacctgtttacatagctcataaggccgcacgtcgggctttaatgcgtgtgatcaatctgtcaatgacataacaatgcctggatggtctttttcttcacgttttgctatcgaggtgtgaggatgcagctgccgccaacgctgagttatacggtcatctcactatgtaacttagcgtgacagttaccaagggcggatcacaatggtagaacccataggcaacaaaaaataggtgactatttaagttcctgatagaaaaggctttaacggcttgtttataagcggaaactctggagcgggcgaagggagccgaggacaaccagctaacttcttgtttcttaaagactgatgaatccagtggttacagtgatggttacacatggagaggctgaaggtcaagacttgaagtacgtaacattcccacaaaaggaatagaacaccgtcactgactacccggccttttggtctgactgagggtagggctacgggggtaaatcgtcaggcttattgtattagatagggtctcacatttttcagtcaaaaactcatcagtatcagactttaggccagaccatcagcacgactaccagagccagctttagcaggaagaccacgagatagactttgtgtaggtccacttggtcctcctttctgcatccatgaactagattactagtacaaaataaaggccagacatccagttcggaagtctgaccaatagtcgttattgttagcttgtcttagtgaaactcaggcgtttgactacaggcagaacagcagtagccgggccagtacccatcttgacagtcgtagcagcctcagcgaccacgaataccttaccgagaatctccaggtcatgggactgagagtcaccatcccgggataagaccacagtaatgttctcgccatcgtgacggaagcaaccgaagctcagagcagtgaagcgcttagccatcatgaacacaccacggtcctcaccgttgtaatacgcaatatctgtccccagcatatcgacgatagcgtcttcaccaccgaagccctgcttagcagccagacgggagagagccttaaggtgggactcatgagcaatgatgccatagtcagtaaccgcagaaccgaaagaggtctcggtgttctcataaagagcatccatgatagcgtctgctttagcagtcaggctcccggtcaggacaggaagctctacggtcttcagcagcttggaggactccagaacgtcaaccatcttagagttaatggtacggaccacgttatcgcagatgttcagagcgtcttgctggagcgtcccctgagtgaaaccagttgaggacttagcatcccacagctttgtttggtgagacacgaggatagcctgttcaataggctcaacagtgatttcagtaccagacggagcggtcacgacttcaggtcgcttaccaccacggacagggaccagcacagagcggtcagccagagtgtgagcaatgattggggtcggtaagctgttgcgtgttggcagaatctcaatcgggaacggaatgttatcctgagtgtctttaagtacaccgttcagcatggacttaacggtctgggctaaacgcagagcgtaaacctgcgggtcagcgttagtcggcagaccttctttaacctgaatgttgtctgtgtcggtgatacgtactggctcaatgccgaactgatagctgtctttagtcatagtcataataatcaatctcctaaattagtttagatactgtgagtcctcaaaactgaggggtcccgacatcaggtcaggaccacttgtgtgtctgtcttacaggttgtccatccagttaccgcctgactcaaggtcagcgacaatagcggcacgggagcgaccagcggaatgggtagcactgcggaggttctcaccataggtccggcgttcagctttgacctgttcgcggcgctgtagctctttttgccactctgcatcggtcatgttctcttcacgcatacgctcagcctgaagccgctgctctttagcgatacgctcagcctcagctcgtttgttcatctggcggcgttggtaggcggtcagcaggtcattactgacgaagttgccaatagctacaccagcttcagccagagcttccagtaactccatagactcacggctggtagacggcaggcctgacaggtagcccggaatgagggtcttgatagcgagggacagcggataggactgaccgtccagactcacagtattctcgtaaagattgatgtcggtgactgacagtttccagtcgttgttgttgaataacataaattggtactcctcttgagagttgagagttgagactatcggtctcgcagacatagctatgcctacggtctccccgcatcggtcatctcaaaaggtttaaatagggttaggtttgatcactcttaacgatcaattgaagacattacgattggaacaaacgatcaatagctatgtggttatttgctaagccataaaaagaaaatgggcaaaccgtggactagtactcctgcaaaagtagatttacctaatagctaattttaaaatcactttgtctttatcgggggacaaagtgattctttgttttatacataagcaaaatccctcaaacgaggaatcttgattctgaataaaagagggattttatgctgaattgaatagaatttctctaatggttaacactaagctcaaattatcaattggaggagatatcgtgaaagtaatccatggaatcagagtatatgaaaaaggagaaaaagtcttttttgaaactgaaatgccatccattccagaatacatgtattctaaattcgggtggaaaattatcgaaatagatggtaagaactattgggccccgatggaggaggaagaatatatacatattgttgcaaaatatttagggatttcaccgagtgaagttgatttaaacttagttcattgtggaacgatgggggacaatggttgttttggagattgtaccggaaatagattttgtaaaaggtggagtactggagattcaacaggatgtatttgtggtgcttaaaactaaacaaatatttgatttttttcttcttcaaaatcccgtaaatcataatgtttgattgttgttgagacatcttcatgatgagctacatatttgcttatcaattcaattttgactttcttaacttctaggagataagtgatgcacgaagctttaaagaggtgggggtttatacgtcgaccaaggatgtctgataacacatcagagcaaaaataatcagcccaagactctgacatctgtttaggctctccgccatactgagtagtgaagaggtattcatgatcatagccacgtttttcatgccataagcgaagatactccagtgcttctgtgttaatcatgtactcaagaggttttccttcacctttaccttttccaaataccttatgactcatcacgtatgactgaccctctggaacagggtaatctaatatttctgtttttaactgtatgagttctgctcttcgcccgccaacattaaaggcagtagcaagccatgccatccccaaataattttcgtcctcttttagggcgtccatcatcagtttataatcatcatatgtaactttaactttttcataggtagtggttttaggaatagctggaagcccgcgggtgaaatttctgaatttctcataattatgatcatcttctgcaacaacattttcgatataattatttaacgatgatacaccggctttttttaaagcaatcccacttgaagacatcccacgattctttaagaaactttgatacctaatgaaatcacgctttgagatcttataaagttttttcccgttaagagaggtatgtacccaccaaaagaattggcgaagggaggagtaatactgctttcgtgttttatctctaaatgaatgagcatctaaaaactcttgaaccaagtttctgtgctcttcatctacttgctcccacattgattccgtgacctcggggagttttattgctcgagatctgagcatattcttttcaattggtttggtcattaattcaccaccattagtctgttttaataccatctgcttttaaatctttttttagcgctgcggttaatcgtccatctcttaaggtctcagaggtattcttcataaaaggacgagggttaccgtatccatatccatatgaatcagggtatgtatacccctgcccggtttcaataactgtagcaatgtcttttccatcatcttctctaatattgtccaatgacaccccgttgctttcgttggtggttataaaggcatctttaacttgtcctgtgcgttcataaagtaggggatcatatgcaccgtaaacatcttcaacaatatgctcttgtcctgtttttaccataatttgtttcacattagaggaagacttatgaattgattgaattgcagcttgttcaaccatagctttgatatctttaattgttttcgccactaacttcaccagaaccagtctctatttcttctaccttttctagaataagcttgttgatttcctggtggctcatagttaacaagtcttcagtgattttttctaaagcttttgttgcatccttaagcttcttcatactttcttttggaaaactgttaataatcatagggaagaattcggaatctacaagcttaaggtaccatttaactttatttttgatgtcattcggaatccccaaatctgaaaattctttgacaattgaaaagaatacccattgaacagtgttgattttactaaaatcaatacctttatcttcagctttttgttgatcagagatcatttcagttagcatttttgttaaccgagaaggagaaaagtatgggtagatgaatacatgtacatcatcggttaattggactttttctttcttgtcatacttattgacactttcctcaattaaacttaaattcaatttttttgatgccatttaatatcctccttaatatcctcattttgagcaaacaatgataacgtgtttattctgtagataaggtaactgaagtataggcttccccaacaatttcttgatattgttcaggagtaattaagttattgtctactccttctttgagttcttccttagttacatcatcgtaataataagcttctttaacctgatcaagagttgcccagtttttgtttagggctataacccaaaaattgctcatgctgttgtcccatctttcaagtttttaacttcattttgtaaatttaagattatgcgattttgttttaaaattaaaattctggcttcagctagtgattgtccaagtaattccacatcagaaggttcttcagggggcggtgagaggctgtctatatattcttgagaggctgtttctatccaaacttgttttgataaatcaaatcgtggaaggtaataggagggagagtcaggtaatggaacagaagtgcaattatcgggaaaaatataatctcccttttcatcgatttcagttacaactaggggttcaacgaacataaaattttcgtcatatttatagacttgtatcacgacttacctcctaattcaacggaacaactacatctatgtagtaacccgttattgcagcactgttgtcagctgataccccacttagctgaaggtcaccattagagtttacaaataatttacttctgccgaaagttccactcacttcaacagacttaacagcaccttgtgttggagaaaattcagttggaatagaagcaaatactacatctcggtttgttacaacgtgcccactaagctgcaaagtcccagctactttacgatattgaagtggccttgagcctgtctttgcgccatttttatatgtaacgcttaaccaaggcacgttatcaatttcactgctacttatcaatcgttcccaacttgaccatgctccgtttatcaatgattttctgtaagtcttattatcattagtcagaacaatagcttgaccataaagtttatcagcactacatgtccaaaatccccgcccgttacttggaggtgcttctaaggcagccttatcatatccgaaatatgttaaagtaggagaattcaaaagttcagaatgaaagtcgcttgttatagaaactagtggttgaccatcatcgcttgatattttagttaattgagcagaattccatttacttctttcagtgctagtgatatgacgctcattatcttttatgtgagcatcaaattctaattttgtcgcttgtttatcattcgtaaggtttcctaacccgacctgaattgcagttactttatgaggattgtttgtgttctgagaatgtgcgtcagtatactttttagaattgctttccgcggcattccaagtagttctctctgaagctgtaatatgaataattgtatcttgagcatgttgatcaaattcagttttagttgcttgtttttcattcaggacatttgctaaaccaacttggcttttagttactgaatggggattgagagtatcgtttagatgttcgtcaaattcctctttagttgcttggacattatttaaaacattgcccaaaccaacctgctctttggtgactaaatgaggattagacttatcatcagtatgtttcttgagctcattctgttgatattccataaacaaatttgttttttctgttaatgcttgttcatgctcaagcatatgtttttcagctctgtcattggatcctcttaatgaattgatctgaatattgttttgtttgagttgaccgacgtatttactgctgctcatcttaactcaccacaatccctttaacagttacatcaccagtaacagaaactacttcgaacataactttaaacaatccagcaatgtcgaagtcccaatactcattagtatttaaagtactgctcccaagttggaagtctgttttattggtgccactaagtgcagttttttcgccattttcatcaactgcataaaactttatttctcgtgaagttgaggaaccagagatcttaacagtaagttcccgaaaatgacccactacaaattcttcaccttcagatggggaagttgcggcttcgtgaaatgtaaatgaagttttgtctggaatcgtgattacgacattttcagtcgtttctgtcaacaactccacctccttaatttgaataaaaactgtcttttatctagaaaaacaagaggggaggacttattcaaaaagcccatcctcttgtagcttattccatataccttcccaagctggggtagaggaaggggatgactgaagcgaacttaaaggttcgtactcattgaagtcgccttcaaagcgttgcttgaaatcatcaacactgatataggatccatctgatagtaataggaatttttgttccaaaccatcaaattgtttgaacagaccacatacttcatcaaatgtcattattccatcccccaaacaacgatttttaacccagttagatcaactgtaccggctgctttaactgtcagatgtatttttggagcagtgaaagttaattgtttttgtaaagggtaattctgaacaaaaacaatgctgttgaatagaacagaattatcattacctgatgtagttgcagaataaaatgggatgtttttcggtacggaataaatacttgctaaaactttgctgtttgagctgtctgtttgagttgtgtacatagcaacaccgtaagttctgaaaacaccaagtgaatcgattagatcaactgtataagacttagttgcacctgtagctacggtatcagcatcagtaacaacaaattcagaataggatttttgaacttgggttttaattgctgcagtgtttttaaccaaaacagggacagaagccgtattagttatatttacatcaagtgcagtgttggccacattaacattaagaggctggtcattattgagaccaacctccaaggggacagtggaacgttcaattgatacagctgttatgggattacctgtcccatcatcttttgcagaggtgtatttatcaccgtcctggtttaaaaaagcaataataaacgcctccttaattattcagttgttccgccaagatctgagctttgagatgagccagttccttcatcactagtgacaacgccctttgtcccatcagctttacgttttacacgagcaaagttaccgatttttccgttattatcagcaagggctcgatagccgatttccggagtgtatgcatttcctgcttcaaacgacatatctgcttcaccagagaagtttactttagggagctgaatataaaggtcactgtagatttttgaagtcttaggatcgtattcaattgtgtgaatttcaaagtagtaattctcagagaatttttcaccgttaatttcaacagtctcggcttcaacttcaatttgataatgaactgctaaagcttcacccttggttgcaaaggtatcaggcacagtaactgttttagatgcagcgtcaacttcaatttgatctccatcttcgttagttaatgaaactttagacaatgggagatatgaaaggataaccgtaccagtatcactaactgttaagctttcatcttcccacacagaaattgtttcgttttcaatttttacaccttgctgcattgccatgaaatcaagatcaaagaaagcatttcggacattacccgatacttctttacttgaattaataacatacaggtctcggttaccccatccgccttttaaaaagtcttgttgaacttgttgggaaaactgagtcatttgtgtaacacctgaagcaataaccttattatcgctcagacgtttagctgtaatttttccaacttcatggattactgtttgttttgccaaattgtttcctcctaaataaaaataaaaagagactaaagttaattagcctccaaataattgctcgatatttttagcatctttagtgctcaggtgataagactcttccttgtaaagattaatgtgactactccaatcacttactttgacatcaggagagacggtagcaaaaagtgtggttgtgttataattcataacttcagccatcctgtagaacgacaaatatagttgatacatcgtcatttcagatatttcttcatacgtgtatccgttaaatgcagcaacacagcttactatatcctttaaatcactttgagaatcttgttgcttgagtgatttacttatatcatggaactcctgaagttcatcattgtcaacgaccttgtcttcagtgatacaatgcatgtctagtattagttttcggagacggggaaaattatgttttccaatcaacgatagggaatccttgtttatcaatacttttgaaaaaactttgaaataagcctcgtgaaaatcagggagtaccgaatgtacaatttcataaagatctctctttttcatttcaataataaatgggtcaagcgagccatcctcattaaaccttgaatattctttaataagacttttcttattcatcctcaacatgcttagttctttggtgtagagaggataatcttttaagcggatgaaatcaatctctcctatttcagtctggatcggttttcctaagaaaaagaaatcctttaactcattcatttacttgctccaaaagtaaagatcatcttgtagcccaaatatccgtcagggggattactaataagcaaacgtttataatctactgttacaccaaaaccagcaatatttttattgaaaaataattttgaaaccctgtcgatgattttcaaacttcgatactcagatatctcaaatgtattaatgtgtgtgtatacatcgatcatcaattcttgatttaacaacataaagctttggtttgtcggcttaggcaatgcattccctaaataaatacacatcctacataatggtgaatccgatagatcatctgttttaggtgctcgcttgaatatggtattgattatagcgggagagtcatttgtggagtcataataattttcgagtgattgaacatctggatgagaaggggagagaggatcagttttgtaatacaagagccgattcagttcaacatcatccataactaatctgaagacttttgtcatctgttcaacagtcatgctcatgtcttttcaccaactttctttttggcaaccaattttattgttccgtggtctccataaactttagaatagtctatatcatcgacttgataatcttcgccaaagaaggtgagggtaagtccgattttcaatttttcatgaacaagataaggaattgtaatgtttgcttgaccatcaggaagatttaccgccaattcagtgccatttattgaagttgtcctttcgaatatgcaggggacttcagttttttcgccaggtactttttcataaattggcttaccagtgatttcgttaattttgccagtatcgattagcttgtcttctgaagtaagaaaaaatgatgttccacatatttttatctcagcctttttgtaaatcttattactgagagggtgggaggtgatgagccatgtttcatcattaaacttaacaactccgccacgataaatgtcagcaatttcacctaatatatatcttgcagaaccatcgccactagagtacttagaagtgatcattactgttttttcgattccatcaattgtgactttttcagattcaaaccccttaaggccttgttggaaaataagcttaccatcatgaagaagtttattattaatgttaaccttgtggtaattactgtagtccttcattcgaatcaccgtctgttactaagttatccctaagtctgcttaattcaccacttactgttaaaatagtgtccctgatttctgtgagttcaggatcacttagcagctttttattaaggtatttctccaatttgaagaggactgaattgtttcttttacacagtttattgcaaacaacatctaagtcctcaagctttatttgtccatctttatgtgccgatttaactttaattgtactcatagataatccaccgcagcgttcaatatcaagcgctcaatttcgtctttctgatccattacactttgtttaagtgaattgagttgcgtaccaaagttcttgatccccacgtcattcgtgaagggctgccacgtattctcaaacaaggtctttttatttaacaaaaagatgtatctcaagaagtgtgcaagaataagaagatcatcctcagataattctcgattaacagtttcagttgaattatcagcttttaaattgtctctaagccggttattgaaatgaaggattgcatttcgaattgatttataaatgtcctcttcttgttgaggaacatcaaaatcggacgtctcgcagttgtttaaaaaggtttcccatatttgatcataagatgtcataaaaatccctcctcttagtcaaagagaagggaaggatcagcgactcccatccaatcagccaaaacttttaatttgcctgcagcaatgtcatcactaaattctgaagcaacgtcaataataaattgcttctcagaatccactgtgattttatcgagcttattttttagttgagcaatatttcccgatttaatcatcttttcaatttcttctttggtatgaatgttattttcataagcctccgactcaacaatagaatctttaatctctttggttgtctcgttatcttcaacaataactaattcacctttatcgaaacaaacgctgttcattgtgagccattcaacaacttcttttggaacttctttaatatcagccttcccatttttactaccagaccaagtgtattgtttatgtccaccatcgccggtatacccaacaaaataagacgtacttctgtatcgtgctaacttaattttttcagtcaaatttacatcctcctaaaaaatcctcatattttgatttagatagatactgcagcttgttcttcaataattccgattgcttctccaaaaagaaggttaacagaagcatcttgaacaattttcattttgattctttcatcttcgatatcttgttctgtcaattgacgcagtccgccatactcaacaacagaaaatggtttttgagaaacgccgccggcaaacatataacctttgttgacaggaagttcgactttactatttgtatcatctgtaaatgggttagtgaggttaacagcagttgttcttccgatagttgttggatttagagcagtaaggagctctccttttacttcttctgttaagaagttcttaaacgtagagtctgttccttgttggaatgcgaagtagtcaatgagaagagtgtcagcgacgaagattggttttccaccataacgttgaagcacggaagctactttgttgtattgttgaagagtaaggtttgagcctgtttgaacattttttgcagggattttaccagctgtaattgcgcttgcagttaattgatgaattttatcgaggtacaaacggactttagcatctgcgatatcattcaccaatttattgaagtaaacaattgaatctgttacgagatctaggggttcataatagaaacctgttgacatagttttcggaacagcaggaactgtttcttgtccttcaacacgaactaaatcaacaccagagcctgtagcagaccaaatgacttttgctttattcttttttggaattttaatttctttaatattgcctcgtttttcttgttggacattggccagaagggagaggagctgtgttacttttggtttcgcaatttcatcagcttgttcaacgacaaggttattaaattgatggagcatggaagggtcaggtgtagtaccgccatcaccaaacactttcttaatgtaagtttggatatcagctttgtctgtaccgtccattttgttatttaatacacggctaaacaagcctttgattttcacagtatctaatttcatttaaaatactccttttattgaaatttatttgttatgtattaggcctcgattacttcaaggcgaacaagtttttgtcccattgtgtaaacaaggtcatcttcattatttacaactaggaacttagcagaagaatcagcataatcctcatgaggtgaagtaggatcactaagaatatacttttgagtagcaatatcaaagtgagccacttgaccttgtttaacctcagtcactcctgtattaaatgaaaatgcagaaacatcaaaacgagtataagctggctcaaggataacaattcgagcatgttctcctacaccgttataaaaatctctcattgattcaccaaggtagcgtgcttcaggagatgcaattaaatatgctttttttgttttatctgatagtttcgaagctgtacggttcccctcagcatcaaaaccaagttcaacaagcataaagttatcaatgtctgaaccagtcacttttgcaccgtgagcaactgttttgatttttaaagaattcaagtttccagtagtatgattacctacttcagtaagggctttttgtaatcttgtagccatattttattcctccaagtttaaaatttattgtgaaaagcgtgattcaaaagagtcatcgttagggattaaattttcccgtttacttgaaaattctctaatggttgtatttgtttcagtaggaacactaactaaatcaactaacattgtgttaagttgtaatacagctttttctccttcttcatcttgtttaaccgaagcatggataaggttttgtacttcttctgtactgaatttttcctcagcatttaaagcttcaaatttcgctttatagaattcatttttctcacttagtttttgctctaataaagttttctcgtgtttttctttataaggcttcaattgttccacttcagaatttaattgcacaagcttttcactggcagtgttgaattgctgttcaattcctaccttatccttattgatttgatttacttgtttcgttaaatctttaatttgttcatctttctggttaagttgtgattgaataggctcaggaacaacttcctcccagttgcgcgtcatgaatacctcagttttactgtcaaaatcaattgaaacagtatcgcctgttcttgtgtaattgaacttaaagtatttgtcatagctattttcatctgaccagctatacacgtttacgatgaaatacgtatcatatacatctgcaataaatgaatctgattctttatcaagggttggatctaattggctatatagaagcgtccgaacgtcagagtgagacaattcaaacacttttctaaacttattcattttttcaccttcctcattattttgtcttgtagctgcttgagccactaatctttcaaatcgttgaagttcattaaagcttagaagtttggaagaatcataggcggggaggacaatgtcatgctctccacgtttctctgaatttaaaattgcatgaccttcgaaatagatgggggactgtaggtgttcgataccatcttgcacagtgtaatttgaataaaggatctcacaacttgtattaatgttgatgcctctaccataccattcaagtaaaagttcacatgcatctttaaatcgagagctccaaagtattgcatctgctgccaatacttcttttttgccatctggggtttcaatttcagttatgtatccctcggatgtaaagacaccgattggggcagtatctctttttacttcaagttctccgtgcttatctgtgtctagataagcttcatgagttcccaatgcatctgtagaagtatttaattcatcaacctcgtaatattttgcaacaatcggtttattaataattgttgaagcagcttcaagagcaacatccttagaaattactgtattattgtgagagacatcgaaatcaaaaatgacaaagctacatgacaactttgttgggtcatctgatgttttaatctcattcaattgaagttggcatagttttttcttttgcttctttgtcaaataatttcacctcccttcaaaagtgaagttttaaataggattgtcattaccgttggatgtagctgacttcactgtgttgtcgttgtttttattaccttcatttgggcggccaacttcattcccagtgaaggtatatgaagtttgataaggtctaattttttcttggagtttcagctcttcagtttcatatagagtttgttcaaggtaactttcccaagacactcctgccaaattgtcaactacgtgcttaatagaccagcccttatcgtttaatttaattaagatgtccattttttctttaagagtgagcggcttgtctttatcgtaattcatatagtaattgtctttttgggcagcaggcaaaacaaggttgaataacttttgataaacctcttgttcaatatcctccattaaaacgccaatacgcttataaaatgtatccaagtttaatgacgaagttgcgtagttaccgccatcaccatttaaaagagagccggataatccgtaagcagattgaatgtcgctattgatatgatcaaattttgctccatctaatccatctgctttaacatctggaaaattgatatcagcaaagtcagggattgatactacagtcactccatctttttggtttttttccaaagccgttttaacgccaccatgaattttttgtttaactgctttaggcagcttcatgtttgtgtattcgccattacctttatctgttccaatcgttagaactgcaacagcgttaataattttatttgcaatcgatctttcaacatctttaagtttctttttatggagaacgtcatatagacctggtgtaacccaagatgttcccaatccttgatttctttttagcgtccctgtgcgtagtggaaaagttctttcttgtggcaattccttaaaccgatatttctctcgatctttcatgaagttttcataatcgctttgtttaatataaggggagaggctttttaacaattcgtttctttgatcatctttatacttagtgaacagctccatgtcaactacacatacccagtctccgtttcttctaaaggaggggaatacatatttaatttcatcaaaaataaacggatacgggctcttagcatccccaagccatataccaacaagagtaccagctgtagctacctgttttaacagatccctagtaagtcttttgtgcttaaccttatgtaaggatttattcaaaagggaaatatgcttatctgaagacttaactttattaaaggagtcaattttatagttgagggtagggagggcttcaatcaattcaaacaattggtgaatctcagcagtcgaaatgtaaaaatactgagcaagatcttcaatttcttcttgaaattcatcggggttagaaaagtaattctttaattgttcggcctcaatttccgtaacaatgccattggaaaacatatttgagataaagccggaagcaaatgtagaagtataagttgaatagtcattcagcatttgcttatactcttcagactcaatgtcaactttatttaaggttaccatgtttcacctcatttcttttaaaaatagactaattcatcttcaacgtcatattcagtttgtttgtttaactgtctttctaatacagtagcaatatagttgccataagccactgagctatatctgtcttttcgtttactctttggctctttaagcttaacttgtccgttatcgctatattcagcttctaagttgatcatttcatttattagaagggtaatctgagcatagcttgaaaggaattttcctttaacttcaggagatagcccttcatagcctttaaatcttttcaggtattcttttccttcattttcgttgataggaattttgatttttcctcgtttgaatccatcttttagtaataccgcaatttcgctgttcaattgtgcattacctttaatgctataaattactttttcagcattttgataagtacaacgcgcagccattctttcatcgttaatacatgaaaatggctcatattcttttgcacgttctttatcatataaaggctggcataatgcatcatacacaccaagtccgatactttgagtatctaatacaatataatcgcaatcataatcttcgtatatttgtctaattcttgttgcttgagttcctgtgtgaccacctacgatgctctccatgtatacaatatgacgatcatatccattggagtttggaatcagtctgaatacagtgtaaacactggcatcattatccttaccggccattccagcgatatcattgcttaccagtctaatttctcctggtttcttgccttcatatttgaagttggaatccttgattagactgtaatagtcaggagggaagaggggagaagcaagcttgcggttcttttcaatgtcttcgaatttaaaataggctttttcagattcaccaaaccagagagcttccatttccatagaccaaccgataggatcaaagtcttcttcggccatttcatctctaacctgatctttatccaaaagaccttctttaattgcgatctgataagggagaccacacacaaaatattttgatcctttcatcatggcattgtagtaagttatgaatctgttaaatgaccaatgaaccttgtaccagcaggaagacaagtaaatttctttgtttcgttcttttaagtgagcgtattcttctttttcgagatatttaggagaacggggagctgtcaggaattttcgaagtactttactgatgatttcaaaatcaaccattctgaattcatctacaataaggaggtttgcacgcttggagcgggcgccatcatttgaggctacgattttaatccagctgccattatgaaactccactttagcatcatttgttgaggtttttaaatcttcaatttctcgccttaaattaggtgattctttgcgtaagtcatcaattttctctatgacttcacgagcttgtccctttgtgcccgatgcgataactattttagtacctgggaagagtatggcttgcacacagcagtatacagaggttagccaagttttaccctgcccacgactggccaggtacataaaataatggttatgtaccatcatgtaaattaaaatacattgaaacaatttaagtgtaatacccaagtattcttttacaaaacgatgtgggtttgctctatagaaagaagtccatgcgccgataccatccattaatctttcagattttgatttctttttaaagttgtttccctttttaaaaatattgattcctcgactgtgcttgttgcgatctgttgtaaaatttttatgtgaggtcattttctcgatcctcttcttctgcaacaggttcttcaacagtatgcttattcatttcttcccaatattcctctgaatattgatttttcaaaccaagcattcgagacagatgcccaaggaaaaataccttaatgtatttcccgattttatcaggatctttccatctaggctctggctcaggaataggtctctcattctcatattttttgatcagagtgccaaaagactcttgttcaactccacttgctccagtttcttgaacgggttttaaattacttgacccaagtaaatcttgaagagttttttgctgctgatcgactttttcaccattttcacgccgtttgcgtatatctagccgagtcaaacatatttcatttataagaagttccattcccttagagtcgcattcatacctattcgtgaagtcaatgtactcattctgaagccaaatataatcttcaacatcaagaccacgaccccagaattgcattaattcatctatgtcttccttagatatatcttctgtacttttagctagtaacaattgtgttgtatattcttgttcttcttcaaagtcaaactcactgtctgcccaagtttttgacttgtaatctttcattccgatatttttcatataagtacctaacacatttccagctgattttttcttggactctgattcattaacagcggaaacccacaagtcgtaaacaaaaggacggtcaatcattcttaagatgttttgaacattctttaagttatctttgtctttttggaattcattttggagacagctcttacatactgacagtttgcctgttgcagaattgaaaggagattccgatatataatattgattggcattttgttctttgccgcagcatgagcattttattttttcagcagacatatttcacctccataaagtttatgtaaacacattttacgaaacgcccagcaatagagcggaaggggagtaccgcaatcttcgctgggcgttctaaaaaggtgcttaactataggtcaaatcaccactgggagacatttcgatatcttgtgtttttaacttttcaatcaccatgtccattaaccctttaccaattccacatgtatcaatcaacagtttgtcagggcgtttttcttttaaaatctgaaccaataggtctgcttgatatccgaatgtctgagaagctattcttcttttaatattttcaaatttggagtctttaacattaacaagtaaaactgttgtacaatctgtccggggatcaacgattaacaacctatttccttttggagaatctacgcctattttataatcagcaatgttttcgttttcaacattgctacctaaagtgtaaaaattaacttttgattttgatgcaagtcccattagtttatgtaatttactaataacagtagatatctctttatcacatttgtatccagactgcttgagttgggcaagtgtttctaagtgcttattcagatatttaaagtcttcattcgtcattttcttcttcatcctcaatcgtttttttgtattactttaataaacctttttgcagtcaaccattaatgcgactccaatctaaataaaattaaagttttatcaaaaaaagattaatagtttaactttaggtttaaaaatccactattggatgttgacatctgataaaaaagtggattacactatttatgtattacgatatctaaaggggagatcacgttatggaaaacaaagttacattatcagatcttgtacgtaaaaatataccagtgattttaaagggttcaaaacaccctcttacagaaaaagagctgcttgaagaactagcaaaaaagatacctgaacttgttaagaatggtgaatatagaaatggagttcttcgaggtgtattaaataaattatctacacagccagttgatcgattaggaatttcacgtgagggtaatcgagttaagtattatttcattacagataaaaaaactgagcttcaaaatgttattagaaatctcatcagtgagattaaagaaaaggaattattgacagttgattacttgaatgattcgcctgaaacaattgactttataaaagatgtatctactcacgttaaagacttagagggatttacaagataaacctaattaaagaaggcctaataggagccttctttaatttaatatgtaatcgtattgaataatccgacctttaccggactcataaattgaaaggtttgctccagctttggcacctgtcattaagctgtcactgtattcatcggaacccattacagaagggagttgtataacttggatattatgagtggctgcttcacctacagtgagcatgtttccgtggtggaagtgggagatgtacatgtaatcgtagaattttcgtttcatctgtgagatgtcacgaatggcattctttttgtttttaatctggtgtccgtgacatgcgacaatttcaaattcaagtaatttaaaatccacaattccttcgtcgtataaaggaacttcaattcgctcattgtctttgagtacgtcatggatataagtagctataatacgctctacatcttctttaggcatttccgagcgatttgtattatgtaatcttagttcagtatgatttgcagaagggatatgtatgtacttaattttgacgtgcttagaaagttctaaaagccattcagctttgtacctagagtattttatcacttggtcaataaacccgtactgaagggcagttaattgcgatacgcgcaatgccataccttcaacactgtcagcaccatttaacacgaccagctcatctaaattttctttttgaatgtactcaacagtttcagaaagaatctgattcatacgctgcaaataaatctgttcgttgtattcattgttgttgcttttaaattgcttcccgaagtgttcatctccaaaccctagaacagcagctctttttctttcgttcttatttaatggatagaaggaagggggagggagagtacctactttctcaattgcttcagttacattttcatatagcagctctgttcggcctttgacgcgtgtgtttttatgtatttcatgctttacagcttgaagcttttttctctcttccatgatttcaacctttttcagttccaattcaaggagagaattatttgattcatctgacctttctcgttggtattcaactccttcaatgaagttgttgaaccattttctataagctgattcacctttagattcaccagtttccttgttgattaactctttgatttcttcccagtttagattataaatgtctttattagagcagattcttattttccattctttaaggttttcatctgagtgacgcttagtttgaacaggatcgatcattcagtcagtcatctccttactcaacgcctttaacaggaagttcattttcttcttttacagtaattgaaacattttttccattaaactctgaaagaatttctttgaaatcatatgtgtattcagcttctttagtttgttcagtaacttccattacgtccatatcaaaaaagcctttaacattaatttgatgtacttttttgcttgccatttaaattcctccaataattttctatttacgtacaataagctccttcggaagcccgatgatccgaagcatcggtaacgtccgagaaggggatataaaggagatgaaagataagtcggataggcgttggggaaacgcccgaaggagattattgataacttgcgtaccggaaggctcgtaaacacattccggctgatcagtaaaacgcaagcacaaaaaggccttctaacgatttagatgaccttgttctgattacattctaaccccgtttcacctacgtcattagctcacgttgggacgcaagccttcagatcgacagggattacgctgattacgggttcagcgactgaaacctttgcagttgacaaactataagtaagtcgaaatatcaaaagacgccaaaataacgtcttcaggaactccttgtacatcatggtacatgagcatataaaccggtaatcgctgtgcgaaaactgattctccttctgcacatggcagatgagctaattcatttaagaactgtgtaaaatctctgaattcacagtgaagccttgattagtagcggcaatggaaggaatcccaaagctggacgtatcgcggtatctttagtgtcccccacgcgggattaatcggctactctcgatcagacaatgaaatactaactctaaacctcgacacattatggtggcgaaacaccaataatgagaaggaaagacccattataagccttctcaatggcgttttcagtctctcttgtcaggttacacgccttattgagaaacaaagcgtctcaaactctcgccatttattttgcacagttttctctgacccgtgtaaggaggtatgtgcatgggaaaggtaagtttcttgaaggaaaagtagcgaatatgttactaagtgaaaggaaaaggcaagaccgaaaataatccttttctgtgaaatgacagcggtgatcaagcgcccaaaaccatatcacttattttacgagggtatgtaatttcaaagcctcgtttacccggaaaaattttgttgaccgcataataagcatcgaagcttacaagggcattatttaaagggaagggagacgcatctacattccctaagtgtaagccgaagcagtacaccgcaattaatattcagggatacatgtcacccatagtaagactgtgatgggattcaccctacataaaaaacttgagtagcaaaggtcttaccgacatgtttagcccgataatagccatttatctgtctcctgaagatacagacatccgagttaacctcgcaccctcataaatgactattatccgactaactgcaatgaccagccgcagttttgtgtcagaatgatacagaaaagaagggagtagatattgtttaatcgagaaaagctagttcacactggagaggaatctccactaatattcatttagattagtctttaccttcataaatgaacattagtcgagaactgatatcccaaatatcagtaatcaactaattattgacggcacccccatgccataaataaataactataattaattaacccggagttgaagatgaaaagcgaaaagaggggaggtcgacaatttcctccataacttccaactctgccacttttaggagcataagctctttgtgacaaagcgtgcaggtagcctttcctgtcgtcctcattaactgattatttagctttgactgcgtctttaagtgcttttgctggcttaaatgcaggtgcttttgtagccggaatatcaatttcctctcctgtctggggatttctccctttacgagctgcgcgttcacgaacttcaaatgttccgaaaccaggaatacttactttttctccactttttaatgcctctgaaatagtgtcaaagactttttcgacactgggagctccttcttttttagataccccttgtttttctgccactttagcgattagttctgttttattcataatcaatttcctcctaagtattattaaatttattctaaatgaacaataaagattgtcttttatatagacgggggaaacgtactagcccttttatgtggaaattagctttctgtctcccttatgacgattatctccaaaagtgctctcaacccagtagcaccaagggataaagacacttttttgttgaagtttttttcggtaaaatcgctgtacaccttgggggagtaaggctcaaggcactttctaacggtggttaattctctttttgttatattttttgtatttgtcacgttcttttttctttccacaagactgacagtacttcgctttgttagatgttggcttaaaagcttttccacaaatacagcatcctttaaaggtctttaaattatgcttaatgttctccagtacaatatcgccaaagcactcccacagtgtcgatttgtatttactttttttcttatatagatgttttaccaatacatctgtaataaatccgtcatcattatgtatttccaatagtttttgtttgataatcttatagacataaagtttttgtcctggtttagcttcttcatcattcataagccattttttatttcgatcaagacgtttatattcatttattacggcttcattaagtttaatctctttgtttttgagtaagaagcggtaatcaaattttcctgcaactgcagcaaagttgattcggtcagaagggataatggagtctaacttatttactgtactttcattaatcgattctacgctatgttcttctttatcctttgcattgatgaagaagtggggcactttattttttatgtaatctttgattttctcatcaacgtgatcagggcgggtgggcatgaataaggtttttgcaaaatcgatagtaaagttattctccatgcataaccatttgatcacgtccaggtttatattgtcactgttccatatcttagtgatgttgttactgtactccccgatattgattccataagcaagagttagtgcttcatagatgtttctgctattaatctcttgtttctgggctacagacatttcataatacaaaggaacgatgtccgccatattacgcttggcaatattgacgattagctcatcagaaataattaaggccttatccccgtcattgtcaaactgcagcagcttggatatcggatcatgaatgctggtataaacacctggggtaatgaaccacttttcatattcctcatttttcttgttccacctaacaccatgctctctgaataggtgaggggagcggaggatatcaatatacccttcatcatataaagaacaatggacatcgcttcctgaaagtagtccttttggactctcaattccaagaaacaatctttcacaaaaagcatataggtcaggacataaatatgtataccgggcgtcactgacaagtaattttcctgatttggcgtccttaatcatactcttcttcttattcttaatgatttctttggtgtgatcatcatttagcagctcaggatatattagtagagcttcttgaaggcttgtcttatgtttatttttctcggtagcccctaaaactttcatcattgtttctttatcagtgcctaattgagtaatctcactaacagtctttgagctgatttgtttcaattcctcatctgtgatatccgtgagtgtttgtagcatctggtaagtcagttttccctcaacagatggatcttcttcatttaatttagctcctaaacatccatactttttaaatttatagcgataatcatcccaagaatcatagtacttccacatcttaaactggcttttcgtaaaaattatttggatatcatctttaataatgtcccattctttaccgtagacgtctttaactataaatgaactgtgtttttcagcaaactttctaaagtcaaatggaacaagtagacccttaacccaaggtaatctgaccataaagcttttctgactcaaactagggagcatcattccacaaccatctgtatgttctataggaatatccataatcttacgtgtgatttcatatgtatcccggtcaatataatcaactaggctggaaacatttgtttctaagtcatttacgacaattgctttatcaatatcaatttcccatgaactgctggcgctattcgataaggccatgtagctattccatttgtttatgctgcttccaccttgagcattgatatgctccacactaagaccacaagttaaagcattttgatacttatctaaggtgctttgtttgataaaacaagatttttttgttcttatttgaccggcactgctagtgaaataaacgtatttctcattgttatgtatgaatcctttatcaataatgtcccttaaaatttgaaagtgataagtttggacaaccatgatctcttcagagagagagttttctttgattcccagcgttcgagttaagactgaatcaaataatgaaatcacattattatctttcagagaatctgttctaagtgttcttatttgattatgatcgttaaaggcgttataaagcttttcttttaaggaaataatcctttgcgttatgtacttcttatgttttttatcaacatgttcaagttttctgagatgatctctgtacctatatgattttaaaatcttgttatgtaatttgttttcttgatcattataaaaagcagaagtgtcaatactgtaaatatgtacttgtttatttaggccgtctttttttcctttcaataaattctccccttattacttttatgcatattttttgatttaataatcgctttttagatacttatgtacaagatttttatatgtatagctctttttatcgattgttccaaatagtttatagtcctcataaagagtgttttcttcttgtgaagcagttccttcaataatagcagtctctaaaaatccaattaaattactaaacatgtacgttactttctctgaatccttttgcattatctcacctcctcacttatggatttattatatacatattatttgtatttgtctattgttttttcgctagtgtgttaatagctccaggttaagaggtgaattctgaagcatttagagaaggggggattatcgtaatctaaaaacatgcttatcgtaaaaaatattaaagagtttaaaaagccagtaaacataaggagatttgctgtatcgaatggtgattaggggataaacgatcgtaaaacataagtgagagtaggggaaagtggttgctttatctaaatattgaagaaatcgagtaaatttgaagaggggaaaatgttgatatttaaggcttttacgatagcgattacgatgtgaaaaagggtgattttgaggtggaattaggaaaatgaaaatttggatagggtgtggaaatggaagtgctatgggtacatctgttcccttaattttaccattagatgtaaatatacccccatatattggtattgtaatgcgtgtataaggaacattatacgtgcatttaatgacttgggcaggtctgcaccaatgctatcataattccaggtcaaacacaagaattaatttttaaaaaataaattgtttttcaatttaaaaatgaataaccattcattaaaaataatcgtatttataacgaatccgagggaatcgaagacataatttattcttatccacttacattactatatcatatcttcatatataacccttgtatttactgaccatctcagccttgaaaggtagtcagcaacttgtctttaactaaggttctctttttcaaatcaacatctccttctgtaaacagtttgtttctacactgttaacaattaaagaaacctttagtttctcccgatatattttatgaaactttttgcttctttttgtttacgaaactatttgcttatataataattgtcaaagtgaggaacctactatgtttggagaacgtttaaaaaaatgccgtacctccaaaggatatagccagcaacggatggcggatttcttaggaattacgagacagggatatgggaaatatgaaattggtaaggctgaacctgatttaaaaacccttactaaattaagcaatatattaggagtatctactgactttcttctaaaaggcacacatgcacaatttgatctcgatgagatattaaatgatccagagactttaattgctggatataatggaatgatctcggaagagcaagctaaagagttactgtattatcttttaaaaaaagagttcgaagaacattagtagctattcttaattcttctggtaaaacatttgtttaataaaaagaaaacaaactgtttaacaccattaagttaaatgaaagaaaagaaaaaataactggagtaaaaaggggaaatgaaattgtttaaaaaattggggattttactattaatcacttcactgatattgctcgcagcttgcaaaaatagtgaagagtcttcttcatcatcagaagacacaaacaatgcaactgataccaacacatcagaaagccaagacatctcagttaatggtcctgaaaaagttggggatgtttatgaaattgatggtggtacagctaaagtaatggccatcagcaataaagaaaccactgtgaaaactggcccgatccaatttactgtaaaaaaagtaattgccgctgttgccaacgaacaactaccttttattgatgttcaaattgaatcagaaaatacatctgatgaagtagttcgtttcagaccaagtctagcacaattagcaacaagcactggggtacaaatcgatgagccatcattgttggaaagtgacaggcttctcgacgagtacgtaggaaaagtaaatgatagtggatccatcatatatgtttttgataacgaagaggatataaaagatttagaatcaattcggctgagaatctcttctccatttaatgaggacttaaagaatttaggggacaagctagacttaaaaattaacttagagcattaaaaacaagccctattttggggcttttctttagaaaataaagtcgaacataagtttttattttgttggtaggaggctttaccttgtatcatatttcacttcttgaggaaagaagacgaaaaatttacaccggatcccatcatacattccacctaatcacactcatacattaacacgctctcagagccaatataacacctctctaagcatccttaatcaattcccaatccaattgtattcttgttcattcaaacagcacacaaggcatcttaataccatccatcaacacacaaataacttaccacaaatataaaaaatatgtatataaaaatcatgaattatgttataatagagtcataggaaaggaggtgtacatagtgcttgagaaaatgggtatcgtagttgctttcctcatatctttaacggttcttacaatcaacagtctaacaatagttgagaaggtaagaaacctaaagaatgggacaagcaaaaagaaaaagcgtatacgcaagcggctccgaccaaagagacaacgccaacgtatacgccgatgagagctaagctaaaggggaatgaacttctcctttagttcctacccatattataacatgatcaagcacattgcaaacatgaaacgattctcattatggtttacccatatcacattcattggcttattcttaatgtttcaactcatcaaagattacttcagcagcgaaggacaggcgctaatcaacacaatttttgttgtcacatgtatcattgccatattgttatggatcatctattgtgtattccttaaactaagaaacaagtcacactaatcatataggcctcatggtataattaaatcattgaggtgagatgattggagaaaaaattcctggatgctattcagcagctaacaaaggaattggaaatgctcaagaaagatattgactccatcaaagaagcaactgtcagaattgataaagaccttttagagtacagagaagagataagcaaagtaaaacaagatgattcagtattaatcatgcagcaacacaaggataattaaatatgcgttataaataagggagcggtaaggcaattatcgttccttatttttcgatacaaaattaaaatataaggaggatatatggaaagagttaaagttatcgattctattatgggatctggtaaaacaacttacattattaagatgatgaatgaggcaccaaagaatgagcattttatctttatcacaccatatcttgatgaggtaacaagaataaagaggtcatgtacgaatagaaagttttacgaaccaaaaatacatagtgaggaaggggaaacgctctataaactggattcattacataaacatttagcagataacaatgacattgtaacaactcatgctttattcagtatggctaatgaaacaactaaagaattgatttactcaggcaattatactcttatcctggatgaaactatggaagtggttaagaaattaaatatatccaaggatgatctggatatgctgttccaaaatgaatggattaagaacaataatggcacaatcatttggaatgatgaacaagaaagaaatcttaatagggaatataaaggagagttccaaacacttaaacatttggccaagagtaaaaacttaattttgcataatgagtctgtattgttttggcagtttcctgcagacatctttgcccaatttaaacaggtctataatcttacatatttgtttgatgctcagattcagaaatattattatgacattaacggaatagaatatgaactttatgcagtagtcaaagacaatgacagttataaattaatgcagcacagtaggcaatttgataaagcaaagaaggatgtcctaagacataaaattaaaatatatgaaggtgacttgaataaaattggtgatgattattatgcattatcaaaaaactggtttgaaaaacgttcagtgttacataaacggcttaagaataatattctgaattactaccagaatatacttaaatcaaagtctaagggtaatctttggacaacttttaaatcacataaaagtaaactaagtgggaaaggttatacgaaaggctttttagcctgtaacatcaaagcaacgaacgaatacagtcacaaaagatctttggtttattcaataaacagattcgttaatcctgcaattgatgattattttagatccaagggaataatcataaacgaggacaattttgctttatctgagatgattcaatggatttggagatcagctataagaaatggacaggatattaatatatatgtcccatcatcacgaatgagaaagctgttaatggattggttagagaaccagagataagaatagcgtatgaaaaaaaaagcaataaatcgtttttgaaacccttggtacataagggttttataggggtctctcgtagaagaaaagaagtaaataaattaaataataaaataagagaatgggggtgctgctaattgttcaaaacggttcgttcctcacctgaacaatttttgctcacaccacccccaaaccccctcatgagcaattaatattaacgctatatcaaatacaaaaaatatgtatttaattattgattattatagattatcaagttataatataaataacaaatacaaataatatgtataaaaacaggaggtagttaaaatgaatgcgcaactttttaatctggagtctagacttgatgaattggaaaatgaaattaatacacaatactgtgagttagatactaatcttgatgctcttaaatccaatcgtattgagctggaatcacagcttgaaaaatttgagtctagtcttacaaatagattacaaggaagcatttcaaataactgccgaaatgacctgcttaatctgggatacacgcattcacaagttgattgcatgtctgacgaagaagtttacgctgcactcgataaaattgatgaagaaattcataatactgatcaagattattctacgggatttgaagatcttgaaaaacaaatcattgagatgaagagggactatttcattgatcgaaaagaaagagggtcagggaatttcgatgaggcatgggaaggagaaatccttgatttagaatttgagtacacggttctttgtttagaaaaggggttagaaccactcaattatattattacctgggaaggataggaattagctttaacaagtgattataccgttttaaatgagtcacaatagttcaaagcagcgattcttttcttgaataaagaatgtttagcttcagatatatatcaaaataaaatgcatattttaaatagaatatggatagtgaaagctgtacagaacaaaattggagatggtcatgattgatcttcaagaagacaggttcattaaataatcgcatagaattagggacagagaattaaaagaaaagaagcaggtttggaactctatggggaatgacctccttagtgaaggaattgcaaaagtaatgaagaacttaaataatagactttaaaatttgagaaaataattaggtgataaatttggaaaatatagctcttgaatcctcctttttagagtacgatattaatgaaccgattaaaatctataccggccactttacaattgaagttgctgatgatttttttgaaatcttgggagaagttaaaattgcatttttaccaaaagctagactaatatttgaaggagccatttcaggcaatcttagcaagcttttcgaatttgaaaaggcaatgaaaagtaataatatgatgattaatgtacctggatttatgaaatctgaagttcttatttcaggtataacagacggaagtaaagggaacaaagtatcagggatactaaaacgatctattttaacctcagctgaaactaaagtgaatagaatggaattcacggtggttaacttcgtgaatgatttaggtagaaggattgtgcatggaaggtttaaattttcagggagaacaaaattaaaatataaagattgggaaataattttggataagcgatatgactattcaaacaaaaaaatctttgatagattaaaaaattcgggtggatacttaataacacatgtgggatatttaaaaagagtggatgataaattatttgatactaaagaagtagaaccacttatttcagggctttattggttattatccttttcagcaggtagacatgttgctatccctacattggaaggataccacaacgaggaggtaatatggagtaaataccaagttccattaatagatggctggactaataatattacttggtttccaaaacaaaaatctccatccttagaacatttatttccaaaggtgattgagaagcaagaagatcctttttggaataaagttttatgggaagtgttgagttggtactcccaagcacattcatcaagtatagtagaaaacaaggtggtatctgttcaggttgcattggaaactttggcgtgggtgtatcttattgtagacagaaaatccaatattagtaaatcgaaatataagtatatgaatgcagcagagaaatttagagaaatattatctagattttcaattgacttatcaataccaaaactctttattgacattaaggataattatgacgatggcccacacctttttactgtatttaggaataagatagtccatcctacaagggaacttgattttgacaatccgatagataagctccatgtactttatcttggtgtttggtatcttgaattactaacacttggaatattgggatatgaaggaagttatgtaaaccgtttaaaggtacctataatagaaggagtatatgaatttgtcccttggaaaacaagagacaattaaaaatgtctttataaggatttacagtcagttggcgataaaaatttctcagagttgccatacaaaaaacatttgcttttgactaagtatctatgttgtaagaagttaaaaaggtttaaacggttttcgatttagatcacgaataagaacgataaaacgaacttagatttatgcattattgaccaagtcttatcttggtcttttttatgtatcagttgattactataaggtatcaataaaagacaaatgaaaagagtggaattatgattagatcaaatttaaagtccataatagacgaaagaaagatcagtatccggaagctatctagagatattgatcatgagtatccaactgtcagaaagctttataatgacgaaatggagcggtatccaagagatctgttagataaagtctgtacatacctaaacatcgagctgcaggaattgctgatattcgaaaaaagccataaccatatcgatcactcaggatgaaaatggtatactaaagttacaagcataggaaggaattacaagttttccaggtctacataaaatcgtacttatatggaaaaggtgaaaaattaataaggagaacataaatggatttgtatagaaaagctaaaaggctaaaaaaagaattatcgaaacatgaggaaattaatgattctttgaaagagcttgcatttgatatttttaaagagttaacagtaaaacctgaatttatagacaaaaacaccaatgatgttattggggaggaaaaaattaacaccagcaccttttcaaataaagaaaggttagacattttaattgaatggactattgaaatagatccaatattaagttttattattgataaatgcgatattccaatagaaagaacgggtggggatgatttagatgcttttatggagaatgtttatacagaatatatagaagaattgcataagctaccaaatagaaaatcattcgattcatcaaaaatcacaaagatagaatcttttgcgcaacaaattactaaaacaattgaactttacttagatggttatgtgcatttagcatatgctgaatttgataaaggaatgaatatcttttctgaagaggttaacattgaagagctgctcttatataacattgatagtattcgtattccttgtaaattctttagaatgagaaccagtaacacagaggttttttctaaagatgatatgtttcatataccatttgagaagagaggaataatacgcacaaatcgttttagtataccaggatttccatgtctttaccttggaagttcatcacttgtttgttgggaagaactaggaaggcctgacttaaatactacctacacttcggtttttcaccttgaggatgaagatataaaaattctggatttaagtgtttcacctacggaactggcagataatctaaagaaattttttgaaataacatttagaagaaaaatatataaatttaatgcatactttatgacatggattttaatatctgcatgcctaattagagtaaaaaaacaaaaagacatttttaaaccagaatatatcattcctcaatttttgcttgaatgggttaaacagacagagtcttcggaatactggggaatctgttatttgtcttctaagattaacagacaaacaattgaaaattacaagctatataagaattatgctattcctgttaggcaaagaaaagacagtggacattgttcgttattgggcgagacattccaaatatctgaccccgtagcttgggaaacgttccaaagtcataaggactcaccagaatcgcttcctatcaaaaatccattatttccagaaaccgaagggactcatcatgattaccataaaacagagttggggagactagaggcctttttaattagatatagatcagttgttaaagaccaactgtaactgaaatctaaaaactacgattttaaagggaaatgtgaaacaagcggaggtgctgatttgagcctcaatcaaaaagcgttaaacagttatgtttatactctggcgttttcaagtttgtcatttggtctaatttttggtctgtatctgtttgtttactctggatttatggcaatagcattagtcacaattgccatcattgcattttacgctttaatcacttacttggtgtttgctgcccctttgcaagtgtggctaagaagaaggcgcagaaaattcagtttgatcaattttttaatttatattgcagtggccttttcagctgtgtttttgttctggtttgttgattatccgccaaatgctcttaccatgttcagaagctttgagtattacattatgagtattgtagctgcgtttatttattggttttgggattcgatattcctacgaaattaacatattaaattatgaatttcacaccgtttacaacaagtaagaaggctgctgatccaaacagtaaatattcggacagtttttgtttgcttaatatcgcttcaactccgactaatgataaaagggcggcaacaaataattgcacaacaatcaacaataattcattttgattgaacaatgagtatatgcacaagactaatacaatgcaagaaaccgaaatttttgcaacttttagcaaggtatcactccttatgctaaccttaacacgattacgcgtcttaatccgagagcataaagaatcaagataaaagaagtgttttaaacaaaaagagcattacactaaatgctctttttcatgccacaccttctgcattcacgtaaaaatattccactcttcacagagcttttaaacaaagtgtaatcacaattgtcgcagcggccgtattttacatcaggatattctttgtaatcatatacgattgaagtgtcatatccgtttgtttcgtatttctcttccacaagatcacctacataatttattcaacatactcaagaataccaaatttcgttcgatatagggagggaacaaatgattggattagcttattttttaattatttggcttggagttggattattgactggcattaagtttatttttgttgatcaggtctatgatgaagagtttaaagaactcatggataaagaaacagcagcgggcatggaaaggaatttggccagcctgtttttcaaaaataagcttaatgtgattgctttttttatgttaattggtttactgccattggcaatgaggattacaaaattatttaaaagaggttgatttatgcctttgattgattatttttatgtactgcagtttgaaaacaaggaatactttaaagcatttaaattagatgagagtggttatttgacatctagcgacctccatgaagcttctaaaatacataatatgttagaagtcatcgaggtagcaagtgagcttaaaacgaagtgtaatgtgcaatgtgaggtaagggaaattcaagtcgtaaagcgttaggagtgttcaggtgtattggatagagtggattgagaatggagaaaagaaaaacattgttgcagaaggttggattgaatgggctgctatacttgaagacttgtatcagaagcggttcgagtatgttgaatggaagcggctataacatcttcactattctataaatatgaggtggttgattatatgagtgaccaaaatgaaaaaagtccttcatgggtaggtgacattattaagctgagccctaaatatttattgggactagcagttttttctggaattgggctttggttagggaatgttggattaggaaaaacacttggtataaaagatgctataaatagctataaactttacctagggcttgttttcttagcatcaaccagtttcattttatctcactttatttggtggataagtttggggataaaaaataaaattgaccaaaaatacagttataaactgcaaaaagaaagactccgaaatcttaataggagggaaaaacaaatattaagcccctacatctttgacgatgttcggtctgtggaattaagtataactgatgggacagctcaggaattagaacatttaaagattatttatagaagttctaatattagtaatcgtggttcttattttgcatacaacatacagccttgggcgaggggatatttaacaaaaaacaagcatttattacatgagtcaatagatcacatcttataagacatacagaaaggaaatattcaaatttgaataatataggagaaataatttctaattttgaaggtatcattggggctttattgggagttatagtcactttaattcttactcacatattaaagcactttgggcaaattaaattttatatagttgactttgaaatatattttaaaaccgataatgatggttggggaactaatgttatgccatctaaagatgaagcaaagcaaatagaaatacactcccagattgaaatatacaatggcgctgagatccccaaggttctacgggaaattaaattttgcttttacaaaaacacaaatttaattgtttctgttacccctgatgataaagcaacaactgaagagtttgctgagtttggctattacagggataagttatttaatattaatttgccttctaagcaaatcatcgctattaatataataaaatttttaaacgaaaaggaaactaaacaagtgaaaaaatgcaatagggtttatcttgaggcaaaagatcataacgggaaaatgtacaaagtattcttaggggagttttaaaatgaaaaacacatttttatattttagatgggaagacctccatggtgaaataggtgttgattcctttaatttattgagagcaagttattctaatttgagtgaacagcaattagtagagttaattaaagagttgatatctatagagcgggaggatatcgctgcgaaatttgatatacacctatctgagaatgccccagttttcgatgaacggcaacatgtggtttataaaggcgttgccggagatatgaactacaaagacatgttgctttctttggtaacggcattagatttgactaatacacttgaccatgtgcagaatatcctgtccttagctaaatgcttaagaagttttgatagagaaattttcgctaggtttgcaaaggatattgcggaagaggtgtattatagccttaagtaggaccttttgctttagaagaacacaatgaggtttagtcctcattgtgtctagttaaaattggaattttaaagagattacaaatacaaaaaatatgtataaaataattgactcgtaatgtgatctatagtattattaagttaaccaataaagacaacaaaaagaaatgaggggaaataatggagttaataaggatagctatgaagaaagacttggaaaatgacaactctttaatgaataaatgggcaacagtagctggccttaaaaaccccaatcctctttatgacttcttaaaccatgatgggaaaacatttaatgaattttcttcaatagtcaacattgttaagagtcagtatccagaccgtgaatatgaattaatgaaagattactgtttaaacctagatgttaagacaaaggcagcaagaagtgcattggagtatgctgatgcaaatatgttttttgaaatagaagatgttttaatagattcaatgatttcttgcagcaatatgaaaagtaaagaatatggaaaagtgtataaaatacatagagaactgtctaacagtgttattactgaatttgaggcagtgaaaagactcggcaaattaaatataaaaacacctgaaatgaattctttctcaagactcttgctgctttatcattatttaagcactggtaacttttctccgatggcccaacttataaaacaaattgacctaagtgagatttctgagaacatgtacattagaaatacatatcaaacaagagttcatgttctaatgtctaatataaagttaaatgaaaattcattagaggagtgcagagagtactctaaaaaggcattggaaagtacaaatatcctgagatttcaggttttcagctacttaactattggcaactctctattattttcgaattatgaattggctcaagaaaactttttaaaagggctaagcatttctgttcaaaatgaaaattacaacatgattttccagcaggctttgtgcttcttaaataatgtatggcgcaaagaaaataagtggattaattttgaatctgattcaattatggatttgcaggagcaagctcattgttttatcaactttaatgaaaattccaaagcaaaagaagttttggataaactagatcttttagttcacaacgataatgagcttgcaatgcattattatttgaaaggaagactcgaacaaaataaagcatgtttctattcttcaatcgagtattttaaaaagtctaatgacaaattccttattaggctgccactgttagaactgcaaaagatgggtgaaaatcaaaaacttttagaattacttttactttaaaggaggtgagacaatgaaaaaacttattatggctttagttatcttgggcgcactaggcacttcttacataagtgcagattcttcaatccaacaagcttcaggtgattatgaggttgctggaatgccacgtggagcataaaatccattgacacataaagttattagtattattatttatttaattaaattaaacagagaaaaggaagacgtttggctcttttgagctaagcgtcttttgtagttttaaggccatcacttaaatattaggttttaataacatctagtgatcaacttcaaatacatacaccctaattaaatgaaatgcattacaaagcagcacattcgcaaaaaaattgcgtagaatgtgctatttgtcgttaaaaaaatctttacttcccttttgtaatgcattacaattgctatagatgcaaaagataaaaaatatgtatataggaggttggtggtatgtccgcaattagttacttaaaaaacagtatgacaatgcataaaaccatttaccaaaagaaagttgaaagcttagttaaaaatgatttgttttttcatgaaaaaagcattgaaaagtcaaaaataatgaagaatgaaaatgttcgaaaacaactaactaaaggatacatgaaattgctaagcgaatacaaggaggattaatgatgcatgttgtagaacttaggtctacaaatcataaagatattgatgccgattttgtattaaatgctaaacaaacttacatagagagtgtactaaacattaggaaaatgattgttaatgcaaaaactgaagatgatctacatggtgcaaaaatagagatagcagcattattaaaagatctaaatagagtattattaggtggagatggattaaaaagaagcattgaaaataatccgcattttagatccctaatacattttgtgaagaatttaaaacgacacattgcaattgaatttgaagagtttatttatcaaccataacatatacgcactgcagtctatagtatacataaaaataggaggttgacatgtcagagcgaataaaacagctaatggtcaaacgtggcatcacaatagaggaattgtcgagggagacaatgattgatatgcagacattaaacaaaatcattgaaatgccagatgaatcagatgttacaaccataaagcttatcgctctggtgttgaatgtctctattgatgagttattagatgagaaaggaggagaagataatgcaaaataaaattaaacaattaaaaaattatgcggtttacgatgatatcgagggctttttaatcaataaagatataagaagtagctcagggaattctaactatatgatgccttcatcaactagaagggtgtcgaacaccagaaagaattatgaaggggatattaagcagttctttagtgtgattaaaggtaaagatgtcaaaagtttagttcccgatgatttagttgtaagtaaaagcgaattaagcaactatgtgaagtatcttcaggaaaagggattagttaataatagtattaacagaaaaatgacctccttgaagatgctctatacatatttggagcatgattataaggactatattgacttgtcggtgtttaatactgtcgaaaggcttaaaacagtaactaaaaactgggataaaacaacccagacagaagccgaaagaatcgctcaggatatgtatataaatgaaagacagaaacctttaatgaaaaagctgtttgttaaattcgccatcagaacttcttttcgtgtaagtgcgattttgcgagtaagatggaaagacatacagcttgatgaaagtacaggccattatatagtaacagttattgataaaggatctcaggttgtgtctacaggcattaaccaggtattttatgaggaattgttgcagctgaaggaagaggatgacagcgaaactgaattggtttttcaggggctttcggaacaatctttacgacactccttaaaaaggtcgaaaaaaaggttaggaatacctcctgaaagagaattagtcttacactcatttaagggtgtaggaattgactatgtctatgagaattctggtcacgatttacttgcagcaaaagaacaaggaaatcataaaaacacattaacaacagagagatatatgagcagaaagattaacatagcgaactctgctggtgtaacaatggatgaaaaaatcgatttaaatccactatatgaagcaacccaagaggattttattagtttttttgaaaacgctgatcttgttacattaaaaaagtttataaagcatgtaaatgagcgataatcattttttcggtatattactcagttcaaatgataattcttcttgattaaccagattgcctttggtaactttaaatttagcaacatgacatgaggtgaaaggctatatgacagtgatctttgatcagtctgcaaatgagaaactgctttcagaaatgaaagatgctatctcgaaaaataaacacataagatcttttattaacgatattcaattagagatggctaaaaataaaattactccagggacaacacaaaaattaatttatgatatagaaaatccagaagtcgaaatttctaaagaatatatgtactttttagccaagtccctatactcagttcttgaaagtgaaaggtttaatccacgaaattacttcacagaaacggatatgagagaaattgaaacgttatgggaaggatctgtggaggaagatataaaatttccgtatacattcaaacaagttgtaaagtattcggatgataattatttcttccccatcactgctaaagagttgtttatgctatttgaaaataagttattgcactataatcctaatgctcaaagaacgaacaaaacgaaaaaactagagggctcagatattgagatacctgtaccgcagctcaataaacaatcggttgaagaaataaaggaactgttcttagatgggaaattaattaaatcagtttttacgtttaatgcacgtgttggaagcgcaagttgtggcgaagaattaaaatatgatgacgacactatgtctcttacagtgactgaagacaccattttagacgttttagacgggtatcaccggctaataggcattactatggctataagacaacatcctgagttagatcatttgtttgaagaaacctttaaagtggacatctataactacactcaaaaaagggcgagagagcattttgggcaacaaaacacaataaacccagttaaaaaatctaaagtggctgagatgagtcaaaatgtttattcaaataaaattgttaagtttattcaggacaatagcataattggtgattatataaagacaaatggagactggataaatcagaatcaaaacttacttataactttttctgacttcaaaaaggcaattgaaagaagctattctaaaaaagatttttctactcaagcagacatcttaaaaactgcaagataccttacatctttctttgatgctttagctacacaatatgtagatgagttcttaggtgatatagcaaaagaacggaagagaagttttgtaaacaactatttgttctttaatggttatgtgggattagctaagaaattgcaattagatggggtaagcctagacgagttggaaagtaagattactgatgttttaggctctatagattttagtaagaaaaataagttgtgggatgaattaggtgtagtagacaagaatggaaatgctaaatcaccacaaaagatatggaatttcttcaataatttaaaaatagacgagtaattacttaggagttgtttgttgcaatgttcaatagtgagattaaggaaaaatatttagataccttatctgagggtatggttatgcagatgaggcctatttttgcaaaagcagagattactgagactttatataataaagacatttatgatttcacatcaatgcaaattttagaacttatacgatcattcgatcaaaccactatcggtagtgttcgaagaaccttagcattattgtcattgtatattgattgggcaatttcatataagttaagtaaaggattaaccaatttagcaagaactatttctgaagaagagctttatgaatgtctcggggacaaaaaattatatattacttatagtgaattagaggaaatggaaaatcaattagttaattatcaatctaaggctgtgttaagactactttttgaaggagtttctggtttagctcattctgaattgctaagtttaacgaagaagcaagttgaggatgcaatgcttaacggtaacgttttaaccctctatgattcaaagcacggtgaacgaaaactaaaagttagtagtgaatgtcttgttattgccttaaatgcagctcaggaaactaaatataaattaaagaatgggaaggcaaaaggccaaacaaaagaagtctttttagttgaaaatgattatgtagttaaaacaaaaagaacgtccaacaaaggagacggccaagcaagtaaatttgtcataactaatctaattactgatatatctgagttctttaaaattaactttttaacaccaaatactattgttagatctggtcatttgtatagagcatatcagctttataaagaaaaaggggttattgataactctgtaaggtatcagattatagatgactttaatttaagggtaaaatccaaatatcgagcagtttattcaatgcaagattatattaatgaggaagaagttaataaatattacgcagaagaactaggtctaaaagagacgaccatttaaatatgaaatccatttgactattttggttaaatggatttttcttttatctcaaaaaattgtgaaaaaattcgcatttcgacaaaaatagacaaaataatcactttaaatacatgtttaaatgtagtaagatggtcatgtaaaccatatggtttactaaggaggagaccaagaccaaagtcttagtcgtttcaatgcctttcaaccttgaattcatagaggtcttcgacattacaatctaaagcagcagcaattctttttgcagttcgaatagacatatctactttaactaatcgattatagtcgctcagctgctgtttcttaatcccagttatctctgaaagttcattgattgtaatgtctttctttctacataattcaggtatcaagcattgcccgatctcaactttaatcataatcggacatcctcctgcgttctgttatggaaagacataatacatatcataccatacgaagccgataaataaccactagcataacacctactttctatgtataatgattatacaaaacagaacgcacgttcccttaacaccttaagggtttatcacagaaaattgaacataggagaatgaggatggcaggttatttaaacaatattgcactgaatctggagattgtactcaaaaacaaagcagatagtccagaagtctctgaaacattagtaaccaggatttgtgaaaatttacttttatctaaagaagtctcgtttttaaaagctgacggatcagttgaaaattttaaattaagtgatatggaatatgaaataacaaatacagaagaattgcctgagtaaaaataaaaaaaagaaagactccattaaacataatgtaatcagcagcaagaggagaatgaaggtattgttttgaatatatttgttgatcaagataattacaaagaggttagtctgaaacttacaaaaaaattgctgacttcagaacattatcaattcctactttgtttcaagggagagaaattagatattacaatttcagttacaccacaaagcctcgttaagcttagggatgacatcaatgaattgatctttatgttctcagattaaaattagattcggtcacataaattggccgaatctaattgacagatattaaatgatgggttatagtttattcaaatacaaataatatgtatataggagatggtaaagagagctatgttgcttgatgaaaagctcgataaattaatgaaaacgattctgcgattaaaagcatacaaagaagaggaaaatttacgaagagtcatcggagaatttcattcaataattgattatgcttacgaggggatgtatatagctgaagatatgttaagagaagaagaaagtaagggcaaagaagtaagtacatattgaattgtgtaattttcactaaggtaacaaaattaaaattagtggataaaatgtaagtttcatcgagattcgaattggagggggatatcacttggaattatcattagatgaattgaagctctgtcttaaaccattagtgtttttcggtgagttaaaacttgaaatcagtgattatgaagaaggtaagaaaattgaagtgctggatcatgatgaagggtctttaattaatttagcagaccaaacgattaacgaaaattatgtgtgtactacatgtaattgtactttatataccaatgaaaataatgaagtatgtttcatagagcatccgtatggtgcaatcacagctgtaaataaagatcaagtgattcatttaactaagctaattggagcaatcataaatacggatgaggaggatccagttgaatgaacacagcatacagagtttgggacggcgagcagatgcattattgggatgatgaaggtttgagccttatcatcaaaagcaacggcgattggactttgaaacgtttatacacagatgttttggttccggttgtagacagcacgaatagaaacgcggctctcatgtggggagcaaaggtaagaggcaaatttatttatgataggtctatagtaaaaataacgagtgatgataaagaatcatcagatgtttgcgaagttaagttttcagatggcgttttccaagtagatgtatcaaaaatttccgctgattatgacgtgactgccgtcgggtgggtggaatatgcaactattgaagtaatcggagacgtttatcaaaatcctgagttattggagggtgtgaaatgacaatcaatttgaaagtaaaacaagagaagcgcaaagggttatcaattaatgatatccaagatggatacttcattttaagaaatgacgatgtttggattgtgaaaatggatgttacaaatagaaataagatacatttaatcgatttagagacgttccatgttaaaactgtatcaacaaagaacgatttgaaaagtttgtttgaagattggagccgaattaagatattaagtccgaaacaggtgaatttaaatatcgggttccaatggaaagagtaaaggagggcgcggagtgacaagtgaaatgcaattacaggcacagatcgacgttatcgaaaaagaaaataaggaattgcgtcgcaggaatgaggaattagggcagacggtcgaatgtcagaacaaacagatcgtcactcaaaattggagactgttgtttttcgcttcatcctggatcgtttatggaattgttagtgctataaaatacctttggggataaggagggcgttgagtgatggaggaaatagataacaacgaattgaagttccgaatgattacgccggatggagaatcatttccggttaattctgcacctattgaaggctggcaaaatgatatttggaagacgtttgatgaacagaaacgggttttcgatgcagagattaaaaaagcatttgaacactgtaacgtaccgttggaggaaacaattgaacgggctgaattagtcgtagataaggacgacaacactgttctgaccatagacaaactaccggttttaatcttatataaacctgaatttttatattcgaaaggaaaagcagttcaaagatacaaacgactttatgaggaggacgtggaatgaaggaatttcatttgcacaaatatcccgtgacatcagttgaagggaatgagtatgccgttagcatttataacgatagacactcaaaaggttttgtcaaagtatctttatataaaaaggtgcgcggttttttcaggaaagaaaaattcaagtgtcttacaagagaaggagacttcgctccgagttatttcgaagaaaagtgggattacgattacatacagatggcaatcaatgaagttattaactatgaaaactccataaaggagcaaattaatcatgaaaataaacaaaaggctgcaatagaaaaatttgaagcgtggagtggccaggaggtgtaactgttattggaggttaatgtgaaaacaaaccaaagagaaaaattcatccgaaatggtatcccatatgatgaacttgatacacaaatgattcatttaattgatattttaaatttcaaaattggattaaaaacacgccactgttgttttgggcataaaccatacgaagaaattcaagtgatgtttgaagacgaagtgaacataaaagaagatcagattctagaattagcagaactagcgggtagggaatggaaaggcctacagttaagctttagcaaatgggcaagattttccccattgatgtttaattggtcattggtgttatcgaagagattcagaaacccagaagatccaaataaataccgttatctaagatcagttgaagaattctttgagagctatgctgcaaagaagtgataaaagatgcattttaaattaaatgagacggaggtatttaatggaaagttatctaacagtaattgaacagaatggacagcttttggttgacagccgtgaagtggcagagatggtaggtaagagacatacagatttacttagaagtattgatggatatgtagcgatcttactaaacgcaaaattgcgttcagtggaatttttcttagaaagtacatataaagatgcaactggtcgctcattgaagcatttccatttaacccgaaaaggatgcgatatggttgctaataaaatgactggtgctaaaggggtattattcacagctcaatatgtttctaaatttgaagaaatggagaaggcgttaaaagcaagaccgtccctaattgatacatatctagatatgaatgaagatgaacgtgccattgcttatttcactgaaagaaaagcaaaacgagaattgcaggagcaattaacattggctgaaccaaaagtggagaaatatgatcgctttcttaatacagatggattaatgaaaataggacaagtggcaaaagcaattggcataaaaggaatgggccaaaacaatttatttcgctttttgagggaaaataaagttcttattgatggaacaaacaaaaacgccccatatcaaaaatatgtagaaagaggattctttcaagtgaagacccaggagacaagtgttggaattaaaacaattactcttgttactcctaaaggtgccgattttattgttgatcttctaaagaaacatgggcacaaaagagaaatagcatcatagatttgaaaactttagataaaagtaaaattttaaagagaatcggaggatggaagatggagaataatgttttatacggagtttacagtactagatcacgaaagttttgctttggaattgaggagccttcaaaaacaaaagcaagaaaagagctattcaatcgaattggtacagatgcatacaaatggcgttttgaaataagaaaaattaaaagaaagtagatggaaaaatgaaatttgcaccaatggataaagttaaatttaaaacagctagtcatctcaacaaacttcgaactttaaaaaaaagagttcctgaattagacgatcctttactcggcgaatgctgggaatttgaagaagatggtttgagacaatttgattgggaggagaactacgaatttgtcgctagacccaaacattttaattgggattaaaaacagagtctaattgaagtttaatgagaatcgggggaataaaaatggagaaaatgaacctgctaaaagaaataacaatatttgatttaaataaaatcaaacctggcacaaaagttcaagtaacttggtataaaggaacagagatggagtatacacataat
